United States Patent Application Publication US 2008/0039413 A1 - sequence listing, part 10

SEQ ID NO: 1138 - DNA, 207016 bp, Mus musculus
  misc_feature (1)...(207016): n = A, C, G or T/U
ttgggattgtttttgagatgtcatctctcactgaacctgtagctcactgatcagctgggcaagcttgtcaatgagtttccaggatccatctaactcccttagcacttggaggaggccaccactatgctaggcttctaacatgggctctgcggataggaacttaaaaattctggtgctcgtgtggcagacactttaccaactaagctgtctcctcagatccaacacgctaatactttcaaaaagtgagcttagactcgagggacagttgtaatgaaagcagacattgtttcttcttctacctttagaagccctgagcagagggacatcctgcccactgaagttaggcactgacttccattgtgcatgtttaatggtgggaggagtatttctaacacactgtgttgcccaagacctttgtcatctgtgtgtgcactgtcagctggccttgcatgaatctctctctctcgtgtgtgtgtgtgtgtgtgtgtgtgtgtgtgtgtgtgtgtgtgtgtgtgtgtgttgatctcctcatggccaggagatgctctatggtggttgagattttgtaaacttgcaacctttggattgctaactccaactttggtcctttctttatccaaggaggaaactgtaagagggagagagaagtgtgaggtgatgcttttgaggtgactcggaaagctagaactcccactgtgatttgtgttgggaagttatagtcatgcccttggaatttccttcacagccagcaaacagcctgggtcaaaggtcagattgtgaggtgctgttgtaatgcatccggcatccttactgcctgtggttttaagggaccttatgagcaggaaagatagacagtttcccagttctggtctctgctccttgcttttgaactccaacttttccatttggtgcaaaaggactcaagaatagggttttaggttgttccaagactgttgacaattttctaaataaatcatgtctcaggaataccagttcttaatgaattctcaggagtcattaatagttctcattgcactgcacaccaatgggtcattgtaggcacacattttttgcaacctacttttttttaaattaggtattttcctcatttacatttccaatgctatcccaaaagtccctcataccctcccccccacacacccctacccacccactcccacttcttggccctggcattcccctgtactggggcatataaagtttgcgtgtccaatgggcctctctttccactgatggccaactaggccatcttttgatacatatgcagctagagacacgagctccgggggtactggttagttcatattgttgttccacctatagggttgcagatccctttagctccttgggtactttcactagctctttcattgggggccctgtgatccatccagtagctgactgtgagcatccacttctgtgtttgctacaccccagcatagtctcacaagagacagctatatcagggtcctttcagcaaaatcttgctagtgtatgcaatggtatcagcgtttggaggctgattatgggatggatccctggatatggcagtctctagatggtccatccttttgtctcagctccaaactttgtctctgtaactcctcccatgggtgttttgttcccaattctaagaaggggcaacactttggtcttcattcttcttgagtttcatgtgttttgaaaattgtatcttatatcttgggtattctaagtttctgggctaatatccacttatcagtgaatacatatcatgtgagttcttttgtgattgagttacctcactcaggatgatgccctccaggtccatccatttgcctaggaatttcataaattcattctttttaatagctgagtagtactcctttgtataaatgtaccacattttctgtatccattcctctgttgaggggcatcttggttctttccagcttctggctattataaataaggctgctatgaacatagtggagcatgtgtccttcttaccagttggaacatcttctggatatatgcccaggaggggtattgcgggatcctccggtagtactatgtccaattttctgaggaactgccagactgatttccagagtggttgtaaaagcttgcaatcccaccaacaatggaggagtgttcctctttctccacatcctagccagcatctgctgtcacctgaatttttgatcctagccattctgactggtgtgaggtggaacctcagggttgttttgatttgcatttccctgatgattaaggatgttgaacacttttttcaagtgcttctcagccatttggtattcctcaggtgagaattctttgtttagctctgagccccattttttaatggggttatttgatttttctggagtccaccttcttgagttctttatatatattggatattagtcccctatccgatttgggataggtaaagatcctttcccaatctgttggtggcctttttgtcttattgacggtgtcttttgccttacagaagctttgcaattttatgaggtcccatttgtcaattctcgatcttacagcacaagccattgctgttctattcaggaattttccccctgtgcccatatcttcgaggcttttccccactttctcctccataagtttcactgtctctggttttatgtggagttcgcaacctacttttaataagggctcaacctctcctctagcccagcatccagcagaggtagtggaagagaagagttattaggatatgggggaagcggacttgctcagccagagttccctgggagtaagcttgctctctctcagcagttcagttctgcagcaaacaccaaacaggacttagcagctgcagaccaatcttggcaggcagacaccaggcagctgtcattcaatcctgaagaaacggccagactcaccaaccagcctgaggcgaggctgctatagtggaaaggtgccactggaaccgcaccagcagttcttgtgcgagtttccttctatggtggccttatcacaagttgagcccagcaaatgctatgtacggtgaaccaatagatgtgtgtttttagcaaagaatagcaaagtgaagcaaaccaaaccagagttcagtgctcgtcccccactgtctgtggggtcatatttatactccttcatcaagtgtcctttcatgtgtttgctatatgcaaacatcctttcacctgtgtctgcttcaggaaaacagtctttctttcacatgtttgctttagcaagacatcctttcaccagtgtgccccagcaaaacattgtttgacctaactaactttccaaagaactaaaagttttcacttaaggtcatctcggaaatgcaaatgagtcacaccatggcaactttctttggtttttgtaaagagacattagacaagaggttaacatgacttgcaggcccgtggatgtgtcctgaagagctgtcctccacctggccatcctcttcctctactccagactccatgattcttgcagtgtaaactagcctcagaaaatcgagacgctataataacatgtattagttgactttcctgttcctaagagaaagagaagggatagcccaggcttgccttagacttgctatttagccaaggattaccgtaacatctgatccatttgcctctgcttcctaagttttggggttattagtagtatacgctatctatcatgcccagtcttaaaggagattagacttaaacctgggactagggtacacattaggcagtaggtactcttatcagctgaactaagtccccagcctctgattgctgtctttagttttcattttgaactgcagacctttttttgttttgttttgttttgttttgtttttcctaagttcaggatttgctactttcaccaggatgtgttagcattcgcccaagtgcaatgcacacctctgaaagggtagaaacagaaactggtgccagagttcttctgtacgtatacatgcatggcatatgaatcggtagttgaaagaaaaatttggaaagagggtattcagaggatgactgaaataaggaggagggatgacactgggccttggcaggtaaagacacttgcctcaagcctgacaggccgagtttaatctgcagaaggtagagagaaccagctactgaagttgtcaatggtccccacgtgtgcactgtgctgtgtacaacacacatgtaaataaatgtaaaaaccaataaagtacaaaggaaatgaggtctttagaggacaaggtgataagaagtacatggaattgggtgccttggttttatattaagaagaaacaatactcatgataatatttgcgttctacactctaagaaagggcttgttaaaccttgatgatgctgtgctctgtgtgggatgtgcaggagagcgtttgcagaggagctgtttgggaccatctcaaacccattccatgagccatcttctccttataaagtatttgaaatcaccattaagggattattgttgttagtgagtaatctatgttgtttatgttttagtcatgtcccagaggagactttagcgccacatgtgagcatgcaacatcgccatgatataaggctattatagggtttcctttaaatccagacatacaggtgtagcccccataccccctaccaacccattctatagtgtgtcttctacaagtcacctttggtcacctttttccattttgttcctcctcctcctcctccttgtctacagggagagaaggtgtcccaacatccaggctgtgtattaggaaagtcaagttgtactttacaaattattcgtgtggtgtgtgtgtccatgtgcacctgtacttgtgcaagtgtgcttgtgtgcagggatgtgtctgtccatcttgggggtgtgtgggggtacagtgaagaccagaggactaccttaggtgtcattcctcagataccttgtattctgtcacctgtacctgttcaccttgtattttaagatagggtctttgtctggctacccaggtgacataagccctagggaccctcctgtgtccacctcctggcacttagcttgcaaacctatgctgccatgctcgactttttgaagttggttaattttgtcatctggcaactccatgcatgcctagaataaattctgattacatttcacctctttatctccctcccgttcccatcacaaccccccaactatccctaccagtccctttccccagactaattattaatattcccaggcttgttgttttgtgtgtgtgatgcatttaatcaaggccatccgtgtgaccatggcgtgagaactattcactaaatcctgatggggtccttggttggactttttaaatggcatcttttccatgggttctgggaatggaattcagtccttgtatttgtaagacaagcactttataaccagagccatctccccagtcctctgaattacttgatttcaagtttaaaatcggcaccatcaaactgatttgctgaataagaaagagtctggtcagccccatgcctcaagaactaaaaactcctccacctctctacacgatttctttttgaagcatgattttttttttttttgatacttttaggttaacatacaagtaatgagttgcattaggtcattgtttttgtttgtttgcttgctttttgaaccattgttcaatagtgcaacatgatacatagctgggccagttagagaggaccctccagtaagccagaagtatcttaacagcaaagtctgacaccccactttctttttttttttcttcaggtttaacattgtgtttaatatgtggtcaacatttgaaataagtttatttattttcttcatttacatttcaaatgctatcccaaaagtctcctatatcccctacccccgccctgctcccctacccactcactcccacttcttggccctggcgttcccctctactgagacatataaagtttgctagaccaaggagcctctcttcccaatgatggccgaccaggccatcttctgctacatatgcagctagagacacaagttctgggggtactgattagttcatattgttgttccacctatagggttgcagaccccttcagctcttgggtactttctctagctcctgcactaggggccctgtgttccatcctatagatgactgtgagcgtccacttctgtatttgccagacactggcaaagcctcacaggagacagctatatcagggttctttcagcaaaattgtgctggcgtatacaatagtgtctgcatttggtggctgattgtgggatggacccccaggtggggcactctctggatggtccattctttcattttagctctaaactttgtctctgcaactcctcccatgggtgttttgttcccaattctaagaaggggcaacactttggtcttcattcttcttgagtttcatgtgttttgaaaattgtatcttatatcttgggtattctaagtttctgggctaatatccacttatcagtgaatacatatcatgtgagttcttttgtgattgagttacctcactcaggatgatgccctccaggtccatccatttgcctaggaatttcataaattcattctttttaatagctgagtagtactcctttgtataaatgtaccacattttctgtatccattcctctgttgaggggcatcttggttctttccagcttctggctattataaataaggctgctatgaacatagtggagcatgtgtccttcttaccagttggaacatcttctggatatatgtccaggagaggtattgcgggatcccccggtagtactatgtccagttttctgaggaaccgccagactgatttccagagtggttgtaaaagcttgcaatcccaccaacaatggaggagtgttcttctttctccacatccacgccagcatctgctgtcacctgaatttttgatcttagccattctgactggtgtgaggtggaatctcagggttgttttgatttgcatttccctgatgattaaggatgctgaacattttttcaggtgcttctcagcccttcggtattcctcaggtgagaattctttgtttagctctgtaccccatttttaatggacaccccactttcaaaataacacttcttctagtatggctaaaaacaacgacgcacttggtgagcccatgttactatagaatgtttaggcagcagggacttacgattaaaactggagccagctgacactcatgctcagccttgctctccaaaggatttcctttgcgggtgattgttaggactccaattgtgcctgtgcagctgaaagttgggaggaggagggagggggcagtattattttacaatcatgaggacgaaaagacatttcagcatgcctggcaagccaaacaatgctacagatgtctgctctttctttgtacacacccacaagggcaagcctgttttgaactgacgatgaaaactgggttctccgatctcacttgtgaaggaaacaacaaacaggtgcccctttgagacacaaaccccagcgctgctgtcagaggaaagctgtgccttccaaacatgatgactcaaagggtttctcttccgactcttctcggtgccaacttttgtaggactcttttgcttcctgtaagggaagcatggagcacacttgcagtaaatactgtcaacacctcagtacatggtccaaagcatactgaggagataaagtgaagctagtggattttagtgagggttttattttccagatgaaaacagggtctgagaggtaacattttaagtctgaacctgtcgtgcaatgacatgttttgataaagggactctctgcttcctttttatgacttgatggggcataccttcagtccaagtactccagagggcagaggcaggagaatctctgagagttagaggccagcctgatctatataactagttccatgccagccagggctatgtaagatgtaaatcacatgccagccaggccagcaaaggatggccttaaactcctgactttcccctctacctctcaactgctgggattccaggcatgggcccccttagcaaccctgtgatgaatggcttctggttgtgtttttcggttgtttttaatgaacttcaatacagcatgttagatgattgtacacattccttcctaggattcactcatacacaatgattctaatgagagccgaatgactgtacttaaaaaattatatccaaagtacgcacactgtggctattaagtgcctgattattactggaagttaacatttctggtgtgaccttttttggagaaagaatcattttgacatgttggcatagcagcctagatttcaatctaatttaaaattgtaatgactttcattgaataagggagcgattgagatgaagattttaaaaaaaaaaataatatcagcctgctaggatatctcatatgatcaaggctaaaggagtctcaagtcttgaaggtcagatgaggacttctcacagagctacatcatgtctgaagccaactgactgggctagtatttgcaaacttaaaagctgactagtggaagtttcccccttagttgtcatctattttacccctgtaggatctgtgttatgttaagcttggctgctaagtcatcgtcacaactcagaatcaagagccctttgagattaggcatatccaagcagcagtggtatttaacgtaggtccccaaaccagagagatctgacagggtagaagggtggtggctgccttctttgaagaaggagagggcattttctcatggaattctatgacatctttggacttgttgatggaataatttccggggaataagaagtaacatctttccatcttccctggacaaggtgatcatgaggactttgacaatagtagggtaaacgtaaatgcatcctttaatctgtttgacatagctggtccttgggggcagagagggaggccctcagagagcagtggttctcactcttcctaatgctgcaaccctttaatatagttcctcatgttgtggtgaccccctagccataaaattatttttgttgctacttcataactgtaactttgctactgttatgaatcataatataaataccttatatgcaggatatctgatatgtgatctcctgtgaatgggtcattcaaacccccagagggttgagaactgctgccttagggtcctgtaagatactgagctggaaggggtctgtagatagttgaacctcaacagtggtattggatccagctagtcaagaccaatggccatgtttctcccagaatttgggggtaccattgtaaaatctagccattaccaaagttaaattttgattcttaattatattatattaaaacatattaaaaaataaagataatatccaaagtctttgatcccagctcttactataccttgcctttatctgtactttgtctgtgtctgtgggtgtgttcgtgtttatacaagtgtatgaaagaacagcttatgtgcatgcacccatgtggaggctggggatcagccttgggttatactcttgtctccaccggttgtttgagacagggtctctttggcctggggcttgccaggtaggttaacatcatttttggaggtcagcaaggggaatgggtgagaaggaggcacagactgggtcctgagctttgccttttactcatggtgacagatactgaggagctagtaaagaccaagtgacactaccattcagcattctgctacagaggcatgtgctagtccgtttcacatctatttcatggatcacaaacacctgaagacttagactccatctcgtgtgcctcagttgaacaagctctaccataccagttgctgcacagaaaggtctccataaatgtcttcagccctgctccttcttggcattatatggccaactcccagtgtgggaagcctcattgaagggctagtgccgttcagcccacagaccttcaagaactccatccaactttcagtgaccattcattgtcttctcccatagatgacggagggccgtcgatgtcaagtacatctccttgatgacaggaagctggagctgctagtacaggtaagtcctctgggaacactttcctgcttcctctgtaactaatgaatgggctacacggtagatttgatggtgggtggaggggggttgtctactgtgcttatgtctctgtctagccaaacctgagtgacagtggctgagacacaccaaggtgttctgtgtgtatgctatttttacttgttctatttctatgtacagcctgtctctggtgttcaaggccagatgtatatatataacctattgttacaaatgtctagaagaggaaatttctgcagctcccagtagctattctttctgcttggaaggagttaacaacattgtaacctaaataactcctgtgtctgaaactgatgcaacctccctcagaggggagagagttccttctttccaaattaagctttcatagtaggtgaagaaagaaaaagcaccagtgtctttcatctgtccccgaggactaacagccccctttccaccccaaggcctgggttgctgctaccatcagtggcaaacaattagagaaattgaagtgggaaattaacatatttctccccaaactgagcatattaaaaaacaaacaatcaaacaaacaaccacagagcagccacagaaggcatcagaatccttggtcttagatgtcttcgcctggctcgtgacaaggccattgctttacccaaagcctaaaggatgagggtaatggtgactctgagccttgtttaaagtcattggaaatctagctcagtcccaaccttttatgacacttggtttgatattctctgatgttgttcttacgatggtctccttttctatcatacacatacatgttcactctcacatatacacacatactcactctcacacacatattcactcacactcactctcacaaacacatacactcacacacactcatactctcatatacacacactcacacacaccacatacactcactctcacacacacactcacaaacgcacacacactcactcatacacacactcacacacatcacatatactcactctcacactcacatactcactctcacaagcacactcacacacactcactcatactctcatactcacactcacattcacacacacaccacacacacacacacacacacactactcactctctcatatactcactcactctcacatacacacacacatatacacacacatttgcccacatgtatgtgtgtactgggattacaaagatgggcaccacatccagccattgcatgacatcttgccatgaagacttttcctcacagggatggaatgctgtctctacgctcacaatcagggcattcaagacaatgcaaattacacatgtgcggacgtatctctctggccttggacttgcttcttagacttgcttcttggacttgaaaaatgatccaattacaaactttaagagttaacactttcaacaggattccaataaaacagacgctataaatgggttgcagaaaatggagaaagactcctaattgcaccacgcacacagccattattactcttagactggtgggtgggatttctctccagcatttccttatttacatgtttcactgctgcaattataatatatgcataagctgtgcactttatattcccttatatctgggtccttcctatgtcacagtaagtgatctttattaagagttggatagattccagaaatagacggttgttatctagtcattcacccatttaggttcgcatttaaggttgctgcttttctgccgtacaatgtttccactattacgaacaagtaattgtgattgccctgtcctcgtgtgcagcctacctacattctagattacgaccttattaggctagattccgtggcctacagcctggggttcgacttgggagactgagataacacagggaaaactgagcagaatttctcaggtacaggagcctctccttgctgacccttggcagttaaagttgttaagaatctgtggaggagtttatagcgaagtggcctgtggggtttgtatcacatgcttttctgaaatccaagcttgggggcttagagcagccaccttctgggacaggaaatgagaccacaaagagcagcctggttactgctgattagcaagctgctctggggaaagtatgaatggagacagctgagatgacctgtccaagaaaaactaattactgctacgtactttgagaacaattatattaggcaatcaggagaaacttagcctgaaccctacaaagtcaaaaaaagaaagaaagaaagaaagaaagaaagaaaagaaaagaaaagaaaagaaaagaaaagaaaagaaaagaaaagaaaagaaaaggaaaagataagtattatgttaggcagtcaggagaggctcatgcgactcccaccctttggggagtgtgcttttccattcggttcctcttcctagaactctaagcttcctacctcttgtcctgtgagcatggctaatttccgttcagtctccaagcagttcacagagtcagaggactttcccatccttagcccccgttggcttccactggtcctccctctattccccaggagccccgatctgagcttctctcctgcagcacaagtcacacttcattggcactgcttgtatagtaaccatgtgtgtccctaaatgccctgtctgctgcctgacatacagtgccacccaacactactgttgagtgaaggaaggcatgatcctaaggcatttcctattctgccttagaggacttatagtaccaactgcttggctgaggatgtggtcttgatacacagagtgcatacatgtgtattatgtgcacacacatataaaacaattccaaaccccatggcagagtgggcctcagtataattgggaggaacatggttacagctccccctctcttgctggcatcatcacctcagggtgctgggaaccagacagccacaaaaataatttcatgcagtcacataaacttgatcactgttagcatgatatttccaggccaaaaaaaaaaaaaaaaagtatggccgcatttctgccatcggatgcttaagttggaaagcagcttggtattactgagtgaaatctggatgactttcaaatcccgatggctgtagtaagtgaagcctggcccctgggagggaggacgagaaggcaatggagcaccttcgaggggtttatcctaaatgcccaggcaacattttggcacccatgtagttccttatgtcctcaagtccctctaggaactgctgggtgaatatttatccacaccatgggtgggtacaggtagcaccttggtcacccttcaacctgtagtgtcttgttctgtcatcaaaacatcctaaagctgacgtatttcctaaaaggaaaaacaagacagaccagaaaaccttcactagaggagatgccaccccatctgtgtcctgaagcatcagcattcagagctgggacatcaggcatgttgtgttcagtttggcttctcgagctttgtcttcctattgtggctcctttaaaattattttttttcttctgattggaattcctatttgcaggagcattttaaaagaagaagagggggatgggggacgctggagatagtaatgcttgcctgtaatctctgcactcaggagacacaggaatatggatggaggcttgagacccagcctagtttacagtggccagccaggacttcttggccagatcttaaaaccaaacacagaaaatgtgtttagtgctggtgagaagaacttaaggaagtgtagatggatttccatacgctgtcagcctattgatggggctttggaagctgatcccagggatggctctggacctttccacaatgggcgttttaaaaatagacttcattttcagtagaattgaatggcggaggtgtggctcttcctagcaaggctccctgcaggcttaggatactggaccacatcccactggaaaggaagacaagctcaaggaaacagacgttggccttctcagcctggacggtctcgtctctgcttttcccatcacttttcatgagtggatattttgttctgccaactttgtcacctcacacaataaagctttacacactgaagtcctccccgcctgcacagatggccaccattccccgagattgctgctgtgtttatgaagcttcagtgggatgggaggcaacatgctaaggaagaccacatctgtcccctctaacccagtcttttggtggctggtgacagaaaatttcaaactgtctacttcctgtaaaatagaggaacccgtgattctgagaatcccatggttctgagaatccgggagactctaaggagtctgtgtttcccaacagaagttaggaaggtaacaagacagtgctgcctgccattactttgtgcccctactcttgaacaggtccctagggcaggagcttccagggtccgcaagcccgtaaggcaagagcattactcactggcctatctccccagccctttcctttgctttgaactcagtttctaatctaggcatatccaaccttttgacatcatgacatacatggtcatctacgatgtccacattcaagaaccccggcatggagggcactaaaaaagaaaaccaccagttcgtaaagtgtcacggctatcctgaggtgtctctggtagcggtaagggctgcctggtatggcagaagggtgaggtgactgttaccattcttgcttttctctgacacagacactagtgtgtattggtcttaaggattaaggaagttaacgtgggctttaagtaaagtagtacttggagacagagttgacacgctgcctactatggactagaaaagcaagtgtacaactaactttttaaaaatatgtctggctctaagagtgccacatagaataaacaagcagactttgtccatgcatgcctacatacacattaccctcacagacacttcacagataacatcctctaaaaaatgtaaaaggattggtttctcccgagcaaaccagaaaccaggaattccctcaaagcacatgttgccaaaaaaaaaaaaaaaaagacaagacaagttgatttcatgtcttctcagctgaacagggtaggcaggtggtatcttctgattggctggctgacccgtctgctgaagtctggcccgtatctgccatctgcttccttctgtgctccattcaccaggagtccctgcctcagccaagggctaaggatgcacgcagaggcaaggagtagacaaagggactcagcatcataaaccgtctgtcctggatctctcaggccaccttgtcaagacgagccagagcgggcgggacagcgccgccgtgagctgacctctaccttcagagtgattgccagcatcatttattaagctctgttctgtgaagcaggcacactaccaaatgagcaaaccagatgtcgccccagcccctgggggtggccaataatatttaacatcttaaaggcacatggtaaagcaaacaaatgtgacgatagagtatagccagatgacgtgatggtaattccatatgtcatcgagagttcatttaacagcgtgaaggaataggaaacagctcatgaggtatgcacgcacagatgaatagtttcccctttggggaggagctagaagatgccaaaccttcccccctctccagcaaggacttttaaaaacattcgggagtgggagtgggagtgggggagctagtgagctctttctgtgctggaggaaaacaaaggcggcaaaagccagtctccctgggggatatgagacagggcagagtagcagaacataccagattgatgctaccatctgggaactccctcacacgtatgtggctccagaaccagacagctcagccaagcacaagaatggagggtaggccattcagcatctccagccccagggatgactggtccaggaccttggttgcctagcaacaccactatagagctcccattcccccaagccctcctgcttccccttgtatgttccatttcttcattgaaaccgatcttagcttggtttacaaatctactcaatgagcactgctgatatttggctcaaagcagaagttgaagggggagtgagcaaagtaggaggagggtgtagtaaattcttctccttgcaagctagctaaagttgctctctgtccttttattttggctctggttttactgctaagtccctcacaaaaccatttccacagatcctcttgggtagggctgtaagagaacgcacaaagaccctcatgagaggatttgaacgatgagttccttgctaaggagggatgagaagagatgaggtgaacaacagagctaagcccatagccacacagcacagttcagcggaatgtgaataattttgttgatagaggagacaaatgaaacacacacacacacacacacacacacacacacacaaacacacacctctgtgtgtacctttaacagaggtttggaaatagtgaggagaagttggtctttgtggaaaggattcgtgacaaaggcacccaggggtttacacagctagggttgatgctggtttgcatggtaactctcatgtcgactgtggtagcttgcctactcagataccagtttcctaggtatatttgctaggtgaccaaagtcctgaaccagtcatccctggggctggagatgctggagatgcctactctccatcctgtccttcccgtgcttggctgagctgtctggctgtagagccatatatggactacagagacctggatgctgtggtgatccagctcaccttccctttgggctaagaatcagtagctagcgaccatcaatcactgtttagattgtgtcactctgtcttagttactgctctattgctgtgaagaaacaccatgaacaagacaaccttataaagtatttaattggggtcttgcttataggttttgaggattagtccatgatcattatggcaggaagcagacaagaatggcactggaactttacagctgatagcattacatcatgatctgcaggtggagggagggagnnnnnnnnnnnnnnnnnnnnggagggagagagggagggagggacagacagactgacttggcctggtgtgggcatttgaaacctcagagctcatcctgagtgacacaccttttccaacaaggtcacgtccattcctacaaagccacacctaccaatccttcccagttttaccaactaaggaccaagcattcaactatatgaaccagtggggtcattcatattgagaccaccaaacactcattacaagtttagccaccagtggttcttgttcacaaatgggctgtgtgtcactgtttactccatgatggtgtagacagttctcctctttccagcatttctgcccatgaaccctgtactgtctgataaggaaggatcctgggagacatgtggaggcacatgtatccattttgatgggacttatcacatctagaattaagagggatggaagtccaattcccagggggagacagcatcctcgagtatgacagtgagtagaggaagggacagaaagtggctcacagttagcgcagagtttctagactcttctttcattatacaataacttctcagcccttcaagcagttcccctatctcactcagcagagagctaagtattaacccctcccggctgtttggacggatttcaaatcctatagcccctgtcacatgcctccagctgctttcgagactctgtgacaggctccctgagcggtgtctccacctccacacttaaccccagtacccaggcccctcctcctcacaactaggtatcgtcctcttgcatctgctctgagaaggagcccctgagtctccaatcaaccaagggtctgcactcatggctccttcatctgtcactaccctcctcatccctacattttatcagtttttcgcctcacagccttccctctcctgggcaggggacacctcagtgtagacacagggctccttacaggtgtactgtctgcatggagtcctgaagcagtacttctgtcgtccccccccccccttgtatctggccctccccagcgtgtcttacacgacaccaccaggtagtttttccagaatcgtttctctgtgacctgctccaaagctactcaacagctcatcttatttgacgtttctcttttggttctcaagtcctccataatctaccccataccctgttaacaggagagaatcaaacaggtgacgaagggcttacttaccctgtgggattacagtcactgcctgcgatttctaatgcaatgaattggctctgtaattaagagtaaaggcaaccacatggcttttctatagtcttaatcaattgcttcctgaaatttcttttagctgcaaagtcctttgtctaatgctctgtaaatagaggaggttttactccacaaacttgccccttgtcactaatagagtcttaacgggggctaactcatgagttagaaattatcattttacttagatacaagagaatagaaattttaagtggttctttatgcaaaatatatgcattcatacatagctcaatgcaaatcgaatttattcacatatgccatcctttaaatgttttgggaaattgtatgtcattgacttactattatattagctgatttaattagttaccatttatttttgtacctgagtctattctaagaggtccttaagtgccgaaccatccaatcagccccactgccccacatcacagaagactgttaatgttcccatttatcagataagaaaaccagggcacagagagcctgcatgacttacccagagttttgcagctgggagagacaggtcggagctatgccttctgcctccagaatgagaaaggagctccagaatgttgaggccagacctgcttaaaccagaatctggcgcttagtgactcaggatgttggccagttggttagcctctttgaagttcagtatctttctctgtaaaagggcacattagcttccagctcctttaatcttatctgtaaatcaatgctgatttgcgtcttatggaactagttctgagtgaataaatctgtgccacgctctgaagatctccaggcacttggcaggcatctctccacaggaacccaaagcttagactggaccacttggtagctatggaaacctggtcagtccttcgcctttgctgcctcatctgtaaaatgggaatgttagccttggcttgggcagtgtaaatagacaactacagaatgtttaccttgtttgttggagtgttttttctaattaccttgccttccatgtgattgtgctcaaaactttctacactgtttgtagtgtggagctaggataaatgaacaagtaacaggctggcagtccctcaaaaacacactttaactgtcacctgatcttttcacagatactggtcaccagtcctcatcttcccagtgttacacataagtcacatgaaaaggtcatgccacggtgagggaaatttatgtgcatgtgttcatgcagggtctagataaccatctagagggcagaattaggttttgtgcttcaacaatgtcagacctgatcactcattcttgggaataaaataggggaaatgagcttgatagttgccatggcaacactttataaatggccggcccttagtgcttggtgtttaatgatggtgaagcacaagcttatatggctggctcacactggctatgatctgtaggaaagttaaaaatagaaagcacgactggtgggctgcgggcgcagaaagtctgctgcaccaggccaggtctgccgatctggggctggggccacggggtgtgagacgaagctggggaggagcggggaggcggtggtcctgcacggctcgggtccccgtgtggcgccgggtccggggctcagggcgacctgcatggagtgtgaggcgcacaactaagctaagggatccttctcatcgtgtctggagccatgctagtgctggccctgcactgagcgtctaggttcttccccaaatagccagcccaagacttggtggtgcgtgattcagcaaaggaaacaactacccgaagcccagacctgatgcatttggtaaacttgaaatgcaaagggacaaatctggactctgagctgggccatcgtggggaaagattagaatggttaaggtctctgggatctcccagagcctaaaagagttaaaattctggagtctgcgaacaaaacagaactctgaagacagagggacttagtaggtaaatgatcttgccaccaggcctgactcgagaaaatcaactccagcaagttgtctctggatctccactcgagcaccccaacatgtacataaataaatgtaataaattaaaaaaaatagaaagcacattctctcccttataagcaaggctgtgattggcctgttgggcctgtgactcacaggctcgggttaccacaagttcaagtctgggtattagctgctagttcccagaagacctgtgtgcctttcatagaggttgcagtcccctgacccgaattttatagtgcacagtgggactcgtgtcttggggcattgaaacacaccctgctccactgcaaagctctgagtcctgtgtgaccaagaaggtgctggaaccgcagcaccgccagggttcccaggagagccccattccccaaagaatgcttcagggcctgtacacactgattaaggatctttttttcctttttgggaaggcagttttaaaattccacatggagtcctttgagagtggtaatagaccagtatagtgatcgttccgttttaaattgttgatggattgtaagatatattgctacaataaactgggccatatgttggttctatcaaaaatcctgtgcaagcattcctccactttgaccttccatatgctcataacagtgtcagtggtttataaaataacaaaaaagagcatcagtagactaatatctccatatttcataccagggtcatttagaagtacagtaattcccccagaacgcctgggagccccactccactgtaccatatgtgagttatagaggcacagacacttggggaactgttgcttttcactctcctggagatcaaacaactgacttataaactagtgagtctcttggtatccaaatgccttcagtgttgtggggtctataaaatacatacacgcccataagcactcatgcatactaacaacccacatacacaaatgtgcttatagtcacatggacacactgacactatcataatactcatatgcatatacaagtacacactcatatagcacacacacacatatctctaagtacataaattatgtgtatatatatatatatatatatacacatacatgcatatataaagtacaccagtcttagcagaaatatatactgtatactcttagtttaccaacacttgtctcgacaaacaattctcttttcttaaaactgtttttatttcaattgtatgtgtacctgcatatttatgactgtatgtaggtatgtgcatatgactgcagtgtccaaggaagccagaggtgtcagatgccccctggggctagactcacaggcagttgttgagctgcccaacctgagtgctgagaaccaaactcaggtcccctagaggagcaacaagtattcttagccactgagtcatctctctagaccccaagccatactcttgaataatataaaaatggctgtcctcctacataatctgacttctggctcaggggtactgggtgaagccgattctaggatctcacttgtgtgtgtgagtgtgtgtgtgtgtgtgtgtgtgtgtgtatacatatatatatgtatatatatattgtgatagtgtcagtgtgttcgtgtggatgtaagcacatgtatgtgagctcatctgtgtatgttattagtatgcataagtgcttgtgggagtgtgtgtatttggtagaccccacaacactgaaggcatttggatactgagatactcactagcttctgagtagtccttagcttacatccttgccaacagaaatgagtatattgtcacagggcagccagccccagctacctcaagtatcatcttgtgactgtaggaaaaggactcttattattgagggaaagggttcccagatggtccccaagcctgttctatcttccacagtggctcatatcctcatgtcttagctggtcacccactggggagcagagaaaaagcagttgtttgaaatcagcaatctcaaagtgtattcctggaggaagaacaccagctctgttcagtgttcagacagaaagggagtaggctcaagatgtccagaacctgaccagcaaaggccctgagcatcaggattagaggtgtactcggcctataggagtctcacacaggagactgcagactgtctgcctttctggaacttgcttgcatgacttacagataagaggcaggacaggggagtgggtcacagacttttggattaaaaggatttggaattgtaaagatgcatggttggctaattcgctaccagcaaggtgcattttaaaaatgtcttgctttgatttgttgtttattctgctgtagcaattcgatgacctaggctggccttgaatttgagatgctcatgggcctgtactatctgtgtgtgtgtgtgtgtgtgtgtgtgtgtgtgtgtgtgtgtgttggaaataagtgaggcaagtattctggaatagtttctttttctttgctaaatgaaggtataaagtaaacatagtcacccatgccaaccatttgcctaacagaacagagcgtacactcgtagacatcagaagaaagggcagtctttggagtaaactgcattaactagaatcccatatatcagggttatttttttcttgtttcaccatcaatccaagcaaaaggcacccagacttctaatcatgcacggggttggtctccgtgatgactagcttccatcacaagtcatttcattagcataacctcaaagtcataaactctcctgccaggggctgctgagatggctttgtgggtaaagtgcttgccacttaagcctgattacctgagttcaatccccaggacccaaaggatggaaaaagagaacaaacttcagcaaactgtcctctggcctcaccactggtgctccacttagatagatagatagatagatagatagatagatagatagatagatagatagatagatagatagataaatgcagtgtaaaaactttatccttatactcaagacaatcacagagtatagtgccagcgccaggaaccagagacaacagcagtcagattcttaaatctaaagggacagctatggctgcagcgtagttctgtggtagcattcttgtctaccatgcttgaggtcccgggctcccaaatattgcaaaaacaaacaaacagacgcaatggctaaagggtcaggcacccagatctcaaactttggttacacttgttgaaataagatcaaagttaatgtttagagtctcagcttccaagcatggacttcgatgttagtccaaattttaaatgctactatatcagccacagtgggtactgcaataaaaggccacaggctaggtggagggattaaagtcagaaatgcatgtctcacaggcctagatgatagaagtccaagagcggatgtaagcagggttatctttccagagccgtctctctggcttgcagctggctgcattccttctgtcttcatgtggccttggctttatatcctcctccctcctcctcctccatccctcccctcctccttgcctcctcttcatggtcttctttttctttctcctcctttttcttctcctttccttcttcctcttcttcttcctcctgccccttctcctcctcctcctttcttctactttttcctttttcttcctcctcctcctttcttgacactgatcctgttgaatggagactctgcccctataacttcatttagtcacctcttcaaaggtcatttcagaatccagctactttctaagactccatgatttggatgttaacagtggatttgagggggtggagaaatgactccggtgtgaagagcactgctgtaggagaggacccaggttcagtctcaagtaccatatgagactcttacaaccacatgtggctccagctccaagggatgcagtgccctcttctgccctctttaggcacctgtactcacatgtccatacactgagacatacacacaacttaaaaatgaaactatttttaagaaacaataagtttagagaggggcaattcaacccaaaaccatgaccctgggtacataatcttctcaagtcttagaatctactttgttttttgatatgtaaggaaaagaacaagcagtaatcacatgtacaaaagctgctgggaagccagggaacagcagggacgctgcctgctagcctgcccctggcagtgccgcagcctcaccgcaccatttttataaggacacagtggcttgctgtctggaatgagccatccgtttctctgtctgaaagtcagtatttcccagtcatgggcttctcttgttccagctctgagacacttggcaagtccacagagcaagccaagcatcagctgggttcagccctagccagctcagacttgagtcatcactctgagttaagcttgtatcacccactctagcactctgtcgtagccaccgtaagttgtggctaaggactcccaggtgtccctgctcctctgtggccacacacagcaagtctgtatgcctgcgacttaaagaacctttatgtacactctgacataactgtgtggaaatccagaaaaccccataagactaagccctcaggctgctgggagctcacagaacaaaaagaccaggatgctaacggcatctgaggccaaattgcctgcgccaccaccaaaccccaagaactttacaactacacgaggagttccctttggcaggctctctgcctgtggcagggatcccagtggctgagctgtaccactgaagaagctcattcaaaagttatttcctcacaaacagcttccctagtcttacatccagatgtgttactaaataagtggtgacctcccaaaagtgcctgcagaaaggctgattcttctaggcccacccagccctgaagttacactagtcatcataagatgccttttcttcaatgttgtggttatagccagtacattagaccctagactaaaggaaaacggtcattgtccccatctcccaagagcatgcagtctaaagagtgaaatgtcaatccagtcagatatatagagacgaatttctaaaagtagaagcactgaaccaagaagggaaacagcaaagagataagatttttaagtcagccacccatgcatggtgtgttatagctcagagtgctttcccaagtaagaatagaaaagccctgccctgtctttcacagaagttttcagactactgtatctttccatcttttgcaaaatgttccctggccaagttctcatggagaccaagagattctcaactgctatgacgcagtaggagaggggaaacagaaaggagaacactcgggttggaatagtagacatgggatcctctgtggttctgcaaatggacatgtgcatattatacaaaaggaatatagttcagattttgagatagggcctcatggtgtagttccatctggccacaaaattataattctcctgcctaccctgctttgtgctgggattacaggtgtataaaactgtcttcttccctctccctccctccttcccaccactgtgtgtgtgtgtgtgtgtgtgtgtgtgtgtgtgtgtgtgtgtgtgtgtgtgtgtgtgtgttagtgtctgcatgtgtgtacatgtatatggcagacaaccttagatatcattcctcagttgctatccacattgtagttttgagacagggtccctggctggtttagacttcaccaaataagctagattggctgctgagtaaaacccagagatctgtctatctctgcatccccagtagtggagtacaatgatccaccaccaccttcacccaccttctcatttcttactggatgcaagggtggctgtcagaggtagagtacctgggaacctattggtcagaatggagagatgagatggacctcgggtgacagcattgtgccagtgggtaaaagcctgaaaggttcccattcggactgacaggttccagcatacagtgggatggctgaaaacttgaccctgtgaccctctgtaactgttacatattgccacttgctgacttagactattggaaaattagaatcggtgtcagtaaataaggttagaaggggaacccttgacttcttagaagaaactgtgactcagatcttgacctgtgctgtgtcttgtgagaaacttctttccagattagtgacagtattgaaagcaaggcgacaggtggcagttaatcgatctacatttgggtggctccctcaacagtaaccccctgtggaagcatatccctaaccttgcactccccccaaaaaacgcctgggagagatggactgcatcaggaagtgagacatgctcatatacactcctttcccatctgtgtaagactctgccaagaaaccttacagttaaaacatctctctgggtggctgcctccacaggctctctggaccatttcaaacccttcaggatagtccaggaattcttttggggagccacagcttcttaaggctcctaggaatagggttcgatgtaaggacactcagggaaatactgtagctggctctggggagacatacatgctacctcagctctcttaagaaccagctgggtggctctgggaggccatttttcttttctgtgttttgccatccaaaagtgacgtttttatcaggtgtaatttcagcactctgggagtggaggcagaaagatcacaagttctaagccagtcttatctaaatagttaagtctttgtctctaatggaggagggacgagggggaggtgagggtggaggcagaggtatagcatatctctgtctcttcatggacacacatgcacatgggcacatgggcacacataccctcacatgcacgtacacatacatgcacacacatacacacacatacacacacacacacacacacacacacaagaccatgatctaaatgatttctttctagcgctttctaatggtctccatcttgggctctgatgctttgggctcagttagatgataccttagtgacatgtcctgtatacatgccatcagagtaaattatctgattgtcttttagccaaattggaactaagagaaaagttggatgaggaagaatttcagagctaagagtgaggtcttaaagtagctcagagagagatgggagggcagtgtcaactctgtcagctcaaactgtcagttcactgtgtctccagtgcctttaagtcactcacttttaatggccttcctggacacaatccctgcatccacatggcctgtccagtgcccatccctcttctctggatgtcttttgtgatcctcaagactgcccactggatgggaaatttcaggctcatcaatttagctttcccgatgccccaggagataaaattagtctctccaaaatttttctttctatgtcaggctctcacatcccttaactcttcagaaatgattgcttagaatcctggaaggagcctcaggggtaagggggctgattccaccattcttcttctagcagaagaccaagggctgagctcatgtctgcaagcaggactatattttaggaaagactgaagtaatttgtgtccagagactgactgctagctatttctttcccccttctcctttgctttggaagtgctagagataaaatccagagtctcctggtagacaggagttctgctgctcagccacatcctacaacctccggaaaccaaagctgggtttgctacctggatatatggtctttttaaaataactagttcacatactctcggcgatgagaacctctttctgtgggtccagttagacatgtccaacatatgtatgtgtatatgtatttgtatatgaatatgtgtgagacatttgcgcacatacacaggcacatgccttgtgtctgtgtgtgtgacagagattatcttaaagtccccttaactgatgacaatggctgacagacttactctagatttctttcaaaaaactcctaatttgggaggagggacagacaacatcagactggcttcagactctctgtgtgactgaggatggtgttacagttctgatcctcctgcctgcactgggatttcatacatgggcaccacagctagttttgtgctggagatggatcccagggcttcaagcatgctaggagctacctcctgggctgctcggtctttgaatttcagcacaaccgaatacccactttttgtttcaaagacatcttttaacagttgttttgaggcataattgaactttacaaaattatatgttttgctttcttttgtttaaaatgtggtctcacagtgcagcccaagttgtctaggacaccactgtgcagtctactctgacctgacacaaattttctgacttaaccttctaagaggagcagatgtgtgtcctaccacggacgacccgaattacaggcatctgaagcatgcaatgtgcttgtcttgacatgtgtgtattcttgtaggccatagaagggactttggctagtcttgtacctacgcaaaggccctctgagcccttagatcccctgccctcccccagaagtccttctggctttgcggagaagccactggtcatggccacgaggtaacccgcagaatgctgagcaagcagtttggttctgagtgttcactggactggggaattctcaggagcgtttagaggaaagtcgggtggttttgttgctccttcacccagagttcaagactgggcatttggtaggcaggaatgcaccatgcgacattgctctagccttgaagggctctcgggaacagtgagagaaagctgtgttggactcttatgagccagaccccgctcactgtgggtggaaagttttacttcttcttggcagtggtccagagagacggagtaggaagaactctgggaccctgggaccagattttgctgttgttattggtttggtttttgctttgttgttgtttcaaaactaaatctcaactccatgcttacgaagcacgctggccatgcaggacaggatgcaggttctggggtggacaacagagtggtgcccatgcaggggtttgagctgctatccttcaggagaccctgtccttccctcctgatcttgctttttttttttttttttctgctttcgcaaataaatactcaggctttgaactcctgggaaagttttttgttgtcctcccaggtgtgtagacaagaaaaccagagaaagcaaaagtcaccagagttctgttctttcctgtatgttgagttataaaagttggctctcatacagaggcaattctctttaatcgaagtacaaaagacacacagaaaagaccagtaatgaacagtctgtgtggctttctttatgtggacaatgatttaagcacgcagaacccacattatgccctttgtctctcgttattgccattgagccaggtgtccagtctgcattgcatcctgggattctgctctgcaatgcatcctgggaagcaatcactctgtgaccatcaatagcgtggctttctattcagggccattgggtgacttattcagagtgaaggctatatagagtcagacatgttgcagtgtttctgtggcacttaaaacagaaaaagagaatctgtgccttatgttcttgaaaagtgggacatgttacttcaaatgatatttacatgacatccccccccaaaaaaaaaattaggccaggaggaaatgagagatatctcaaatcaatgagatttccttcctagactagtcatgaaaaaaataagagattaatagaaaaaaatctgaggttcttagttgcataaaatgtgtgtatttatcttccctggaggagctatatcccagcaaaggccaagggtcagatgacatgcaaatgactgtgctttgtgacatcacaggattcttgtatttattgtttttatttggattgtttggattatcaattaatagtaagtgaaaagggcctgtttgtaggcatgtccaactcccttgccctatttggaaaaaaacatcatggatcttaaattttttccttctaccttacttaatgggtataaagcattagttttgggtaacgaataattctagacattggctgctcagccatgagacatgtagtcagtcacatacttgaaaacaacactatacatttaggctacatatgttagaaggtagattttttattattattaaatacaacttttgtaaaatgcacctaatgccttgagctgcttggaaaacattttggtaaccaacacttcattagcaaagaaagtgagcctgggtttaagttggcttggtcagggcaggccagcagcattccaccactcaggtgcccatgtctgtgttaataataattgtacttgggattagagagatggttcagtggttaagaggactgactgctcttccagaggccctgagttcaattcccagcaaccacatggtggctcacaaccatctgtaatggggtctgatgccttcttctggtgtgtctgaagacagtgacagtgtagtcatacataaaataaatacatctttaaaatgatgatgatgataataataataattctactcaagaatttcatatcatagccccttaaggggtaaaagaaagaaagaaatgcttaatatagtgcttaggctgtgttttcacagaggcataattgggaactcacttagcatcttctgacctcttcattttccagaagataaggaaatgtggtggtgcctcaaggtatggaaagcacatctctcttctagtccagcccccctaccttaaggtactccctggagaacagaaatccagatatgagatccaggtgtgaacacctggctagttaccaaggctacagtgtagccaagcaggatctccaacagagacgttaggtgagtcccagggtgggaagctgcagctacagattaggtggctgtgctgggattgtactggctgaggtcaaggatgggttcttaggactgggttaaaccaagtccatgataggctgtagatcccaacttttctgtactctgaactgcaaaattctgaagtcagtggagttggggtaagaatcttgacctctgctcttgcatgaacttgtatgtacctaagcagtaactcacatcttctgacctcttcattccccggaagggaagggaaatgaggtggtgcctctgggtgtgggaagccccatcctcgtttttctgattgttgattgtctagggaatgaaacccagaactttgcacacggtgggcaaacgcattaccaccgagctgcgtcccacatcctcgtggctttggaggaagatacactttcatggcttttcatcatttcctttgaacacatccttgacttcctgggaagtcagccaggctgactgagaggctgggaaaggcagctatgcagacaatggcatctcctttgtgcctgtgacttgggccacagtctgaccttctctcctacatatgaaaggaagaggtgagaggtgacagctccaagctcaatggacactcagcctggcagctgatgacactggctgccctggggtcatagcctgtgatgatttccctcttacagactgacagactattatgaatgcaaagcctattaactctattccagaaaggagaacgtgaggcctcaagagagcgagcaaggccagctgaggaaatacacaatgcatctgcagatgaggtcatggctaggctccaatggcagtgacaaggaggggtcagagggtttgaggcattgcatgggaaccgcctcattaagagtcttccagttaaatgttgcagaacgccctgccagccccagatacagttaatgaaatgcttaagacaagaagagaccaggaggagaaaagggaagtgtggaaagcctgcctttaccctgtgtctccttcggtcacactggtacagcttcctcagctcgctagcaggggtgggacacagtgggccctcagtgctggacccatagctgaagagtcccagtgagcaaagagaaattcccagtggatgaagctgcttccctgatccagctgtgagaatacaaccccatcaactcagtacttaacaggctgagtcagaaggatcgtgatttcgaggctaacctgggctatagatcatgtatattttttaaaaatcagagactggggctataggatgtagctgagttgtcacccgcttgcctaggctgggcaaagcccttggttccatcccaatcactgcagaaaggaaagcagaaatggctgacagaagggaaggtggaaagggagagggagggagagggaggaggaaataaagacagacccccctgagccctcctaagtaagacgtcatcaagtagctttgggaggggctgaacttggcaggaatcagagctgagcaggtgagttagctaaaggcttacaggatgagggaacagaacccaggctcatgttggtttcaataaatctgaaagctcctcttctccctccttcaccatgcatccagtcatcctgcgctcgttcatctgtgcatccatccatctatccatccatccatccatccatccatctatccatccatccatccatccatccagtcatccatccacccatccatccatccatctatccatccatccatctatccatcctctatccatccatccatccatccatccatccatccacccacccatccatccatccatccatccgtccatccatccatccatccacccctgcaatcagtccacactcaccacccagctcggtggaaatgaaggaactgtgttagttacttatctaattgctgcaacgaagacccaagaaaaacagcttagggacagaagcctttatttgggcttacactcaaaggatgcagtttatttagtggagagtttatagaggacagaggttgaggtagttggccactgtgcatctagctagagtcaggaagcagagagctgaggtgggactttggctcactccttttcctttgttatagagtcctctggaacctcagctcctggaatggagtttagagtcggtcttcccttgtctagaattccctcacagacacgcccagagtcttaactccttattctagagcctgccacatggacaaatagagatatacactacagaaatacacaaatcaactttctgagcaaagtcagaaacgtgttggggcatatgcctcaggatgacaggaagtccccgcctgagggctcagtgagcccagctacagagctgctgggtcaggggaagcaggtacccaacatttgtatgtaaaccaagcattacttaccacagagcgcaacaaaaaaggaaggggcatttcatcaaaagagagatctctcaagaggctgagtgttatgctaaagcagggtcgtcggaatcagggagtagaggaactctttaccctctctgccaccccagtgctcacggtacttctctttacacctctgatgtgcttgccaaactgtcaaagaagaaacacagttcaaagccatcctgtttccctgacgaccaaccagcgcatccatcttcaggtcaagggtgtgagatccattcatctgctttcggttttctgactgtgactttttgcacactcccctcccttctgatcagtctcctggggctgtttccctttgcctatattggggctgacttcatgtgccaaactccctattttacactatttaaaactctgtaagcctcctgtaatttttttttggaaatgaatagggagtaggaaaataatgaactattttttgcttatttatgtgtgctgtggctgtgtgtgcatatgtacatgtgtgctcacatttggtggcaaacatatacagagatacacacaagtacatgtggaggcccagtgttgacatctggtgtttttctaagtttctctctccttatacattgaagcaaagccaaactcgtagtttgatttctggatcaagacagagtgcagtgccaagaggcttaataatgactgacacaggcaagtgtttaacccctgataaaactctgcctccagactttctgcccaaacccacgtctgtaaatatccaacatcaggtctctctgggatagcacactagattccagaagaccgtgcatctgttccaagttgcgatggctgcacagactgcatgtgtgctgtgctgtgctgtgctgtgctgtgctgtgctgtgctgtgctgtgctgtgctgtgctgtgctgtgctaggctgtgctgtgctgtctacaggactagaccagaagccatttgtgtcagctgccgttctgtttatcccagaaactatgctgcagacatactctctaatgtccctgatgtgctcttcatgggtctacttgcagaaagaggcttgcctgacctatcagcaagccccagaggtctgcctgtctctgtcacttcggtctgggaggactagagcatgccgccatgcctggcttttttctgtgtgttttggtgataaagctcaggccctcgaacgcctgtggcaggcactttactgactgatctctctacccacatctcttttgtctgctctcgaagcccgtcttctgtctacatagtcattccagctatgcccaccagctggaatgactgcactcccccttttataacacaaataccttgcaaatgcccaaggatgtgcctaaagctaccaacagtaccaaactctatgtccaccatgttttttctctctctatatatatatatacctatgatgtctggttggtaaattagacagaggaagagataaacagctaatgatcaaatagaacagtgataacaatgtgctattacaaacgccgtgtgatgtctcgaaagagttaaggcaagcaggggttatggcacacccctctcatcccagcacttgggttgcaaaggcaagaggattatgaagttcaaggccagtgtgtgctccctgtcccccaaaagaaaaaaagaatgtgagagaaaatgttaatatttaattgttattggcattagtattttgtcaatgtaattcatacttacattagtgtcataagtatattttatcaacataatttgtattgatatctgtatttttggcccattgttgactgtgtgtaattggaaatacaggaaacagaagcatagataatgagaaacgatagaaatttatcttgaccatgttggaagaacttcgccttatggtctccgtctccctattttatactattttaaattctgtgagcctcctgtacttttttttttttttagaaattaatagggtgtaggaaaataataaaaatgtttgcatatttatgtgtatgagtgtgtatatgtgtgttcacatgtgtgggggcaaacatatgcagagacacacaatcacatgtggaggcccagtgttgacatccggtgttttcctcagtttctctcgttgctgggatgagctcactcttctggctaagtctggctagctagttccctccagggcttttccgtcttggcctctcatgcactgtgggatacaggcgtggcagcacaaccacccagcttttaagtagatgctcaacatctgaactccggtcctcatgcttgcaaagcaagtactttacacactgaaccccacaagaaatagattttacccaagcacaaggagattgctgaaatcgggccaaagccactaatgtaaatatctgacaccaggtctcaccaatcagtgttgtgattgtctacaagcttgcttcaagatgtgctatggtatgcagtcttccgtcatctgctaggcccctttagcatatcggaacgcagcaggaagtttcggttgccttttatatagttggggaatggcgtgtggggggggtcattttcacaaaactttttcaggagtaaatatttgttcagtcttaaattggccctcccttcctaggctcccgggatccagtacttgtggactttttcattatcctcctgccctggtgagaatgcattcttacttgtattgaaagtgacatcagcagcagagcagaatgcatctccccagtgcaggcagcagatacctgccagcaagcagcaagagctacccacagggaagagccacaggagggcacttggggaccttccaaattaaaatgctgataaacatggaaaagccatgcagagtctccaggcatattgctggagctagagagagtctgtctctgtgtctctgtctctctgtgtgtatctttctatctgtgtctgtctctgtctctctgtgtctgtgtctatgtctccctccctccttccctccctccctcnnnnnnnnnnnnnnnnnnnnggatgggcactggacaggccatgtggatgcagggattgtgtccaggaaggccattaaaagtgagtgacttaaaggcactggagacacagtgaactgacagtttgagctgacagagttgacactgccctcccatctctctctgagctactttaagacctcactcttagctctgaaattcttcctcatccaacttttctcttagttccaatttggctaaaagacaatcagataatttactctgatggcatgtatacaggacatgtcactaaggtatcatctaactgagcccaaagcatcagagcccaagatggagaccattagaaagcgctagaaagaaatcatttagatcatggtcttgtgtgtgtgtgtgtgtgtgtgtgtgtatgtgtgtgtatgcctccctccctccctccctccctccctccttctctccatctccctagcctatgagcataattttagttctacagaagcagtaggcagtgtgataatgtgtttctacagtggatggggcagatattctacagattacaggcgaggggtgggtgctatttagggccaggctacaggaggatgttctggtccaaaggaagctgtctgctttctgttctccttactgtcgggatttccagcagaggatgacagttcatgaaaagaggacttaggctgtgatagataagtcctttgtcagagcaataaggggctgagggatcttacagggattcagtctctggttgaagaagaaagatgaggccatttttactgatgacctagtaggtggccatttattgtccctaaaactttaagaggtaaatattggtgttccaatgtctagtaaccaatcagcataaacttcacagttgggttttggagccccgtggtctggatcacacgtagcccaggtttatttgtttgtttgtttgtttaaggaaagttgttgttgttgttgttttaagaggattcactcctatattatttatagtccccctccaaacctctacttctcaccagcagtatactgcaaggcaagtgtctcttatcaaaatggtagcaataaagccacaatctctggacactagccatatgctaggcaaaggacaccaagtacacagagacccttccgtccattaggaggcagtgtagcaaaaacaatttcccctttattcttcatctccacgcctttgcaacgtacaccctctaataacccttaactcctggacacttctagctgtcataacatatgacagtgaccatgcaaacaccttggcctcgtcaaagacttccacatgtgccatggagaaccaatttcaagactccagtttcagtggctgttccctgattctgggacaatgccctcttctacaattccctgtgaataaagcaaatggaataattatcagagcttcggggtaaaagccggagcttggacagccccgagagactagatgtggctctcccagcccaatatgccaattaaagagattagtgatggtgaaaagcagagaaagaggcttaatcaatcaatctctctcttctaagtctgcagagaggacctgagagaagagtacagttaccctaagtctatctgtggggtactgacatgagccttggatttaaatagagggggaaatggggcaggggaaataggaaagtataatgtagcagtcctggtgcagaatggtttagctaatcacagcctcggttctggtccataaggtggtctcatgctgatactcagttgtatgctcatgctccgagacgcagccatgttatcatgaacaaccgccctcatacgtgtcatggtccctcctgagaggcctggctgttcctagaaattaaggtgtggaatgaattggagatttgcaggtgcctcatagagatgcagaacctaactttctagtaatctgatagaaaaatgtctctgcttctctggtatctgtgtcattggcctgggtgggaggcagataggttctggacacacaaggattaataagcctatgtccacaggtgaacaagtggcccaaagtaaaggagccatgcaaagtgaagggagaaagtccaggtttgtgccaagcaaggagcgagtccttttctgcaaaagcagcttctaatgcctgttagattataattcagtgtgcaatatcatgaggacttccagtttgaatgactcctggtggccactggctactggcccaggagaagtgcaataatcctctaatatgttctttggtcttagagggcttaacttcatcttccagggaacataaagatgtgagcaggtttacatccaaagaagacatctgtattctgtattcttcatagcacaagataagggtagcatcaaatatgcagagcaatgtgtgtgtgtgtgtgtgtgtgtatgtgcaggcatgtgcatgcttttatgtgcatgtgtgttatgtatgtgtgtgcttatatgtgcatgtgtatgttaggtatgtgtgttacatgtgtgtgtacatatctggtatatgaaggtctatttgcacatgtgtaagctccatagatctttttttctccactttcccagtactaggatcacagaaacatatcatcacaccattttgtatatgcgctaaggttccatctcaggtttccatatttaactggcgttttaccaacagagccatctcccaaacccaggcatcttaaaaaagcaaacaaaaaaacagaaaacaattagttagttagtatttgtatgtgaacctgtgtaagtttactgtcctgcccacagaggccagggagtatcagagtcacctcgtgtagatgctgggaaccaaatccaggtcctctgggaaagcagtaagctctcttaaccactgagccatcttgataacccccttccccacccccacacatcttttaaagaggaaaagtagaagcagtggatgagatagtggcagaagatgaagcttgaactgccaaggttaaactcagttcagcatctccatagtcactagaaatacttcccaattcagccataaacttgagagacctttgtgacgcagctggaagagcctgtgttcctcccaccaaagcaaatctattgttcattaacagtcctgtgacatcaccctaagcaggatggagtctggggggtggctgtgtgaatacagaggcaggagggatgccctaatgaacacctgcctgccttccagagcccctggggggatcctgtgtaaagcaggctccccagcgggtcagggtagctcttggagtttatagaggagcaatcatcatgtctgtctgtctgtcaaagccttcattgggcaccattcaagtccatgaggaagaaagagttcctcccacactcagagtgggcttgactgttctggtgcctcactcagaccaggttgtatttgagaacttggatgagaccatatggaaataaaaggaagcgatcaagagaagaaaagataagaggcaggtggggagcagggtgtgaggggtagctaagaagctttaaaaggttcccaagagagacttcatccccaaggcttgtctcttggaagatttgcagagagagtttgaggggagcctaactcaaagactaagaaaagggatcctttcttgcacataacaacgcagtgcctctctggaggtgtaagatctgactgatacccagccacactcattcacggacttatggacggaagtggagcaagggccgcagtgtgcatgtgggtcagatgacaacctcatgggagtgttttcgccttccatcatgtgaatcccagggatcaaatcaggtcatgaggtttattggcaagcatctttacccactgagccatcctttgcatagctgcctctggccctgtctagctggtgggggatggacagcactgtgtagcagctctcttgcttcatgtctgagtgtctgtacaaccatctatgcctgtggtctgcttccatgctgggctgggctgacactaaataccctacccattcatctgtctcactttgccaataaaaacctttattaaatggactggggaaataccacaatttgtaaagtgcttgcctgcagatacgaagcctcaagctgattcccttgaacccataggattttttgttgttgttgttctggtgagtggtgtatgtgtgtgtgtgtgtgtgtgtgtgtgtgtgtgtgtgtttaaagtgggtcctggtgacacacacttgtaatctcatggctggggaggcagagatgggtagctcttccccatggagaaagacctttcctacatatcaccaagccctattcttatcagtctgcaaaaagcaactggcttcagtgtgtcccagccacagaatacagggctccattggagaggctactcatcagagcccctagggtagcaggggaggggcagctgtcagaacctgctgtgcagaattcaaacagaatgacctcatgcactcccttcccccttcccctccccctccccctccccaggaatcaaagcactaactgggctgagtagggaggattcagggttaccaggtcaaactcttcctcactcctctactcaaagttgtcctccacccaggcttcctgaggagtgaattccagccctccgaggccagaaaaaaaaaggaggcggatatgccatcatttctaccgctcttggaagtgaccttttcttctgcctcactgccatggtcactcctaaagagtaggaatcacccatccactaggtcttgggaccctcagcatgtagagtgggtgggcacattagcaggcaaagctggacacagtgcctgcagcggtgtcatgaggggaggcaagtggcccatcagctcaggggacaacatgcaccttgcagtaaggagacaagattgctcctggcaatcttggaatatacctataatgctagcatttctggggagagccagagtctcctttcgaggggggggggttcttagtcttattaataaaagattttattaatctcttaataaaactttaagggaagttcagggatgatttcattgaaatttgagagaaaaacaacaggtcaggtttgctgaaaaatctcaggagctgccaggaatataagatggggttgggggtgggcatatcttttaagtcaagcatgaagatcagcgagagggtgagaaagtccagtgtcagggagagcatgtgcaggctgaaggctagtatttagagggaagggaaagactcgcttagtgcaaggctgtcatctgtgttttggggacacctgctttcaggttaatatgtcctgggcaaagaacagcaccagggatgcagggatagaaatagagagacgtttttaagggaagcgcactcccaagcgtgggaggagcctatgaactaagaaaggagctgcgtccactaagcctggggccctgagcctttctttacagggtatttacataggcagcacccgcagcacccgcctcttccgtgtgttctgggcatgcgctggtattcggatgaagctctagtgggaaagggtttctagtcttcttcatagtgttactctcgatagttcaggtctctgctctccagtcacacaagagtttgggaagctgaggtagggggattccaaattcatggtcatttgggagtgggagaaggactacaaagtgagaactctgtctcaaaaagatacaaataaatgaaaataaacaaaaaccttagagaatgactgactttgccttcagacacgagtcttgatttctcttaaagtacaaggaagaaccatggttacttttgatgttctgatttatttatttatttatttatttatttatttatttttggtttttgagacagggtttctctgtatagccctggctgtcctggaactcactctgtagaccaggctggcctcaaactcagaaatccacctgcctctgcctcccgagtgcaccaccacgcccagcttctttttttactgtgattaacttagaagtggcaactcctttgatgtttaacggtgccctatgggaatagcgtctttgggggaagagtccattgggtgagtggaagtcacttcactgctaacaagtaaggcagggttggctcacctgccttatgcacagggtgacatcagaaccagtttccaaaggggctcaggccccaaatcactcccaaagcagacagccacctggtcctgtactgaggtactctggggaatgtggtgcagaacagatctttgggatcccagtctggggagaggcgcttcctgtggctgccaaaacacagaacaacaaagctggggagtgggggggggggtttgaaatagacagaaccacactcctgaaatccagaggtaggatcattggttgtagccctgtgtctcctggtaggaactagcatggcttgtcctctatgcttccgtgtgtccagcctctgtcttcatgctttgttctatggatgttacgttaaaagttgtcttataaggacacgtacaatggcattcaagcccctctctctttccagagccttaactgtaggtctgggaagatgactccatggatagagtgctccatgcctaagcatgcggacctaagttcagatcatcagcagccttgtaaaagccaaagtcagtagagggaaaggatacagaccgccagatccatggagttcactggccagctagtacgactatcagtgagccccaggctcagccagagaatctgtctccaaagaactagagtggctggagaggtggtgcagagggtagggccatttgctgaccttgcagaggacagggttcagttgtcagatgtcttacaaatgcctgcagcttcagttccaggggatttgtgtactcttctggcctccgtgggtattgtgtattcacagtgtacatacaaatgagctggcgtacacacatacacattaaacaaataaatcttcgttataataaaaaacaactaaggtgtagagtgactgattgaaggagttgctgttgacctctgatctctacagatacatgtgaacgcaacgcacatgctcccacatgtgtgagagctcacacatacaccccgctgtctcagcagtgcaaaatcatctctttggcggtgtaaaatgatgtattcagttgatggctcatggacttacctttaaaggtgactgtttagcacattacaaggtaccataaaattatgtcaccatttagaaaagctaccgtgtgatgggagaataagacacatgtggaaagttatacagaaagggtctccttgagaacatgggctttgggtagcaatgaagattttgaaagggaagtggacaagggtggggttgactaggaaaactgggactactataattgtgtgttcttaaccaccaagcatttaggcttggtaacattttattcatatgtgtatatgtacatatgtatatatgtatatagtcattatatattgtcatttcacatatgtaatgtcattagtgtcatatataaatatatatgtatagtgtgtgtactttataagtacagtaatgaagaactgaaataataatggatggtgtaatactcattttgtgccacacactgatttacataagtcatcattcatttaaccctcatgacagcctgtgacatgggtattgtcattatcatcattttataggtgaggaaactaaggtatagtgcggtcaagcaacttgctccagattgtttaagaaaaatgagatgtgttgatagacaagatttcctaactcgagagagtttttgaatgaaaatgcacaatctctgcgaggactgagtaacttgtgggagaggaagctgtttgatgtgatcatagcgtgaagaagaatattctagaatctttcatgccactgaatgcccccatcatctgacaggcgagaagacagaagtcagaggatttatcatttgtccacagctgtctgtctgaaaaggagtgtgcctgttaagcccaaagtgggcactgatgaatgtgatgaagtgcagttatgtggcagagctccttacagcttacaggtattctgtgtgtgcgtgcacatgtatgtgcacatgcatgtatacatgcatgtgtgaatgtggagatgcatgtacaagatgcatgcacaccagatgtgtgcaggccagaggttgaccctgagtgtcttcctctcagttgctccctgaccaggcaagcgcagggtgagtctccccgcccccagcactggggttagaggtacatgctcaccacccgccccccagcactggtgttagaggtacatgctcaccccccccctagcactggggttagaggtacatgctcaccaccacccccagcactggggttagaggtacatgctacaatgtctaaccttttacattgatcagaaatccaaactcagggtcccaggcttgtgtggcaagcatgttaccaagtgagtgtttcctaacccctggtgctcttttgatcatggtggccactccggtctcctagaagaagcagggcagtgcaggaagtgcaggaagtgcacaggacctaaactgagcccttagactaaatatggttggtatctatggccatgggagcccacgggagccagcacccttctaacctcacaagagtctgtgtggtgagttcagagcaacaaagaccactgctcccccaacctctaacacggtagttgtgcaggtgtccaagctcagttttggaaagtggtatttttagcactgtagtgcctccaatgtgcattcatgcagtggaggacatttgcaaggaagttgttatccaggtataaggagggaagcaatctgacagggaaggcagggtagagaagccagtgaggaaatacagttaaatacaggctgatagaaagcccatctttagttcactgacatccccaccagcatggccagtgaccctgaagaaactggtgtaactcaccaaggacacacggggcttgctttacccacgacgccttcagtcctctaccctgtttgtcccatcaaactcaatggggctacaggccccttttctggcctccctcccagccagatccctgcaaggctccacaaatgtttacagcaccagtaattggcaaattacaatcagcaggattctataaacatcccttctgagtacagaacagccaaagagctttctgcctatcaggcaactcactccaaagcagtgagtgtaaggacctttcagaatgctgtagttcctcagtcactatcatgtcaaggtggaatagtgtcttcctctgcaagattggagaaattaagatgttgatgccatcaatggccccagaccttatgaagatacagtgacagagtcaggcatgatgcaccactgtacggtgataacaaacgacctcacagcctcagcagagcagtgagagctggggtactgaacttgaggtgctgggtgctgctctgcctcttagggatggaagcagaagctgggctgttgcttgtcaccttggtaactgaagacgtgtgtggggttctatgaagattcaagataaacagttacaacctcagtgacttctagaatcttctgttatctccccgtcactgatctgatacctcttcttttatatttttattatattttgtgtgtgtgtgtgtgtcagtacatgtgcatttagagtctgaagatcaactccccatgtcactccttgcacaccttccacatggtatctcacatggacttggagctgatcacatactctagcctggctgggcttgagccataaggatctgcctgtctctgcctcctgagcctaggttagaagcaggcaccaccaaccctacctttacccctccattttctcatggctactcttttatagtttaacaggagaaaggttagtttattacatacagtagacatctcaggatgctggggtctattcttgctgaactcccattggttggtgtgactcttttttattgttagctatctgtcagtgtcataagcatatataatgcattctggttactcgccccacaccctttcaaacttgcctctggagactaaactcagatcctcatggcttgtggggcaggcaagtacctcacaggctctgtgtcttcccagcccttgctccttctgtttttaaactgtgggtgccccacggtgggacttggtctgcaatgctatccatgaaaagcagttgatgattctccatgtttcagcagatattcacccacaagggtgtgtggttcctgtaacagagattaccagagaggggcaagtctgtcgttcccctccccaccatgctgtggctgctcaagctgttcagttgcacagtgataagaagtccctacaaggcttcaaaacggcaaccgttgttcatggtgtcaagtcatctcgacagctttgaggcttggaaatcagagaaagattcacatttgctaagtgcacagcgatgatgtatagatctgtaccatgctggttcagactccgcattttagccctcacccagacagttccttgaggacacgtgatgcttgacctcttacccaggaggtagtaaagtcagccccggcagtgatgcagagaaagattaccactttgaggaaagctagggcttttatttgtttcttttttaattggggtaaatacacataaatttaccatgttaaccatttggtgtatatacaattcaggggcattaacgacaggcacagtattatcaaataagcaccactgtttccaatagtcatcagaatctgaagcagaaattctgtagtcatcaaacagtannnnnnnnnnnnnnnnnnnntcccctccccatccactccccttcccacccactcccacttcttgtccctgatgttcccccgtactgaggcatataaagtttgcaagaccaaggggcctctcttcccaatgatggccgactaggccatcttctgctacatatgtagctagagactcatcttctttttaatatggcttctttcagttattctggcttcagtgttaatttatgtagtgtatatctgaatgttgttcctcttcaaggctgagtagtattccattgtatgtatcctgactttgttttgagttctggtttgctaagactgagaacaaactgtatgctatctctgagtcttggttggtggtcctctgtcatttagataatgatagaacacgtggacgctctcagaactgtgtctgggatacagtagcaatgccttagcaagtcctttgaacagcatggcattataaagcagatgtatgtgaatgtcaactgaagttgttccatgtgtccatttcttcagtttcaaggctcttaatgaactgaaggaggacaccagtgttcaatgcctgttcagcatggtccctgcactccacatgtcccttagctcccttcctgcacactacatttcctcctaaccatttctacaattaatgagtacctttctcctactgaatacacacacacacacacatacacatttgttactttctattgctgtgataaaatactctgtccagaaaaaaaattagagaagagtttatttggacttacagttccaaggggtacagtccatcttggtggtaaaggcatagcagcagggatcatgaggctggcctggcagtcaggaagtagagagatcacatttcattcacacacaggaagcaaagagagggactaggaaatggctataaaaccttaaagtcagtgctatgtgcctccagcaagactccactttctaaaagttccacagccttccccaatagtaccatcagctgaggacccaatattcaaatacaagtgtctatggggaacatttctcattcagaccaccacactgagcaagggtatctggatagcattgaaatcttattcccagagagagagctgtccctttccacgagtgagttggttaccctccatagtttacaagaactcacagtaagcacttcttagtcacacctcattttctaatgtcagattgacccagtgagactcccagtcctcttccactcctatcccatcagatttgacctcaagtgactttcttcccccacccattagacttgaaatgacttttaacatttacaaaattccaaatccattactgagtgctggggagggagtcttgctggcaaggatgctaaatctaacacatgttcccagggcaagtcaaaaagataatcctaaatagaaaaaaaatgttattaagatatgctcttggaaaattgttttccagccttttactctgaggtagtgtctgtctttgtccctaaggggggtttcctgtatgcagcaaaatgttgggtactgtttatgtagtcagtctgttagtctatgtctttttgttggggaattgggtccactgatattaagagatattaaggaaaagtaattgttacttcctgttatgtttgttgttagagttgggattctgttcttgcagctatcttttttttaggtttgttgaagaattactttcttgctttttctagggtgacatttccctccttgtgttggagttttccctttattatcctttgaagggctggatttatggaaagatattgtgtgaatttggttttttcatggaatactttggtttttccatctatggtaattgagagttgtgctgggtatagtagcctggaatggcatttgtgttatcttagggtctgtataacatctgtccaggatcttctggctttcatagtctctggtgagaagtctggtgtaattctgatagtctacctttatcctgagtgaggtaacccaatcacaaaagaacacacatgatatgcactcactgataagtggatataagtccagaaacttagaatacccaagatacaatttgcaaaacacatgaaactcaagatgaagaccaaagtgtggatactttgtttcttcttagaatgggggacaaaattcccatgaaaggagttacagagacaaagttcagagcagagtctgaaggaacgatcatccagagactgccctacttggggatccaccccataaacaatcaccaaacccattcactaggcagatgccaacaagagcctgctaacaggagcctgatatagctgtcttttgcgaggctttgccagtgcctggcaaatacagaaatggatgctcacagtcatccgttggatggagcacaaggtccccaatgaaggagccagagaaatacccagggagatgaaggggtctgaagccccatagaaggaacatcaatatgaactaaccagtatccccgagctccttgaaactataccaccaatcaaagaaaacacatggtggaacttgtggcactagctatacatgtaacagaggatggcctagttggtcatcaatgggaggagagccccttggtcctgtgaaggctctatgccccagtataggggaatgccaggaccaggaatgggagtgggtgggttggggagtagggaagtagagaggtgataggggattttcggaggggaaactaggaacggggataacatttgaaatgtaaataaagaaaatatctaataaaaattttttttaaaaagatatgctcttgctgtgaaactcaagctagccttgaatcccccattcctccttactgtagcctcctaagtgttggggttacaggtgtgtaacccagtgcccagctcaaaatacttccagaaacagcaagcatcacagatacactgtggccactttgaaagatatggcagtcattctgatggataagtgatgatccactgtgttataaaagcagtgaacttgctgtgtcaccacaacccataaattaactcagcccaacatcttctggaaggaatggcagcatttatagtcaagcacatcccacaacacgttcttaagcttgggaactcaaatcttgcagcatctttcataattcatttgtaaaactctgagatgagccacatgcatccctccacaatcccagtgtagacttcttcctatcaaggaagaaagaattgacgtccaatcttgggtgttctattggtttagactcagattgtagcatgcaccaggaagcagagagcactggatgcagttggtgtgtcaaggtggggttttgtggggagccgccctcacattcgccgttgcaagatggcgctgacatcctgtgttctaagtggtaaacaaataatctgcgcatgtgccaagggtagttctccaccccatgtgctctgccttccctgtgatgacaactcggccgatgggctgcagccaatcagggagtgacacgtcctaggcggaggataattctccttaaaagggacggggtttcgccattcttgctcttgctcttgctcttgctctattgcgctctggctcctaaagatgtaagcaatagagctcttgctcttgctctcttgctctctggctcctgaagatgtaagcaataaagctttgccgcagaagattccggtttgttgcgtctttcctggccggtcccgaacgtgtgtaagagggtttcccattggtctctcatttccagggaaggaagtgttactgtcacttcaaccccatggggttctaagtggttttcacttctgagctgctgctcactgatagaagaggaggcagaaacaactgcctgatccctgggcctgtgtctgccctgcacaatggacaatctcacaggattatgaggttaaacaatgtgtaaaaagtgcttagcacagtgcctaccacacagcgaggacagctcctgacccatcaggcaggtcagtgtagggatgttagacttgacaatagtacaaatgcagtctttgttcagtaaaaatcgtgctttgaattttgtatctggatggtttctctgggtcaggctgtgtgctacaatctctaaggatgccaagagccagagcccaatgtgatcaccaggcagaagcagccacactggggagggtgtgtttaacctttcaatgtagctcatgatcttaagtaagtttgccattttgtcatgggctgcattcagggtacccttgagctcatacctgtagccatgtgttgctaaactctggtattcatattcaataaatttgggcttaacattttccaattacactgggtagatcagaaagtaaccttattccaagaataggaaggggtctgcctgtgtttgctaaatagaccaagaactcttcctgtcagagcagtataaggtagggaaggaaagacaccaggctggacagacccactaaagagcaaaaatgtcatttgttgacagaaccaatcttactgagcctccagttgctgccaagacttcccacttggctgttttatacagcagcatcctaatggtctgtttcttttggtctttctccttctctattctctctcttcctccctcactcttggcttcatctctctgtgtacctcatgtagcccaggatagcctcaaacttgctatgcagcagaagataatcatgaactcctgctcctcctgcctctatttctcgtggaaccccatgaagtactcatgcaccatgacaaccagttttatgctgcttggatgattaaacacagggctttgtgcgtgccaggcaagaaccttccttccaactgaaccacatccaagcctctctttggattttacaaaagtcatttgtgtttctgcagtgtgcctgagttctcaggcatttcactgagaacatgctagagacccaagatgatgacgtgacttagcaaaagtctctcgtgagttaatcttcccttctgtgttcttcttccagcccaagcttttggccaaggagcttcttgacctcgtggcctctcatttcaacctgaaggagaaggagtactttggaatagcattcacagatgagacgtaagtgctgtccagagcccacagaccccaaacaaaagagcaggatgtcaaattaccctctctctgctgtgcacagcaaaatcaggctgcaggccacttgggtcccatgggggctacagggtcagtccaagttcaccatctgaatttcaaaagccggtgatcatgcctggagtggccaaaggatataattagatagatgctaatattatgaaattattaggtaatgttctttaaccaagcagatttgtgttcagatgaatgtctaaaatgtttattttttttaaagagtagatctgtgtgggtttagtctttattaaggttaaatgaaaacttctggaaagtaaatgttgctctccagtgttgaagtaacaataacaggaagtggacttgatgataaattcagagtgagagatgatctgggcgagttcacactctaagctgaaatagaagacagcatcagagttcctatcgcccatctgaggtgaaatgtttgttttcagcaaccttccagtttgctgggtaccatcatgttatataataaaggaaggcataggctccatggatgatgtttcaatctcttactatactgttaccaaagagttcagtgaagattggcccaaattcttagataaggatatctaagctaaggactgggggtgcagtgaggggtgaagcacttccctaggcatgtgtggtccttggttccactgtaactggatgacaaatgtctaagagatgtcagtagttcctccacacaaagaactaaaatgagtggggccaggctggaagtctattaaccagatgccagcttgggtctttacaggactcctgcatcttcgcctttcccctactggatatgcctagacacctgcccccacagcttcccacagttcctcctctcagtgttttctgggaacaagaactaaccatctctgagagcctgctcgtactttccctgtctgcccacgttcttcacactctgcttccccccctnnnnnnnnnnnnnnnnnnnnccgcaccaggaaacaaaacaaaacaataacctcctttagacagatgttcccgaaatctcctctgtctgtatctatgcccgcacacccctgtgcatgctcaaatgcccaggtgaggttactggctggcaaggccagtacagtcaagcccagcccccaggaatgaggtggggccattgaggtaggatggaagcaagaataggcagcttctgtgttggtcagtaggaaagccaccttaggcgaccttggctatggttgatcttggagatctgtgagtttgcaagatgtccacacgtaagcctggggctctgacttcaatccccagaatttaagtttaaaaataaaagccaaatttggtccatgacacatgtaatcccaacatagggaagtgtattagaaattccagccagcaaagaatcagccatgagctcagacaggaaagctgttctttgtttaggagtgggcaggagcccaggctaatgctctgggaaggcctggcagtcctccacaatttcttacaacttttacagctcagctgagctcaggtgacagtgtggccaccagaggacagtctctgagtcccatgcctaccaaaaggaatttctgtcaagctaggcatgtgcacagaaacaaattgcagacatgaacattttacaggtagacattttgaagctagcattaaaagcatacaaacatttgaaatgacaataaaaaagtatcctgttttgttaggcacagtgagtggcacagggctaacaaagtctcaggactttaatctcagggggcagcagtgggaggatcctacagcgttccaggacagcccagctacctagagagaccctgtctcaaaaacaaaaacaaacacataaaacctaacagcaataatgatttcttagcaaacaggatctgctgtagaaccttacggtactctggcaagtttttgccttccctggatacagaatgtgaacaggttggcagaagccagcatacttaaataaaattttaactcattttaattctgcacactcctttttagacaaagatttgcagtagtctatcatagaataaagtactgatttgattttcttaggctgtatctataagcctacaaaatatatgttcatatcacctcctcagagacaaactgacctcttgggctcactgtctctccaacttaacctgtttggcagtgagaaaccttagctcaagaaatatggttggggactggagaagtagctcagcagttaagagtgtttgctgttcttccaaaggaactaagcttggttcccagcacccacagagggggactgacaaccatcagtaactgcagctggcctcagatggggatgatctggcctctacagacacccacacatacatgcacatgaaagtaataaataaagatatcaaactttccaaaagaaagaagaaaggtgagcagtgactgagtaacaaaacaacaaaacccaagctatcctgactcccacatgcacacacacacatgcacacctgtacacacacatgtgcacctcacataaaagtgacttttggagcagtggtgtggacagaagcagaggcaagggcaaagcccgagcttacttacaaaaggagtagggtcagtcctggggctgcagcccatagggcaccgaggtagaaggcagtcttgctggtcttctctggtctagacggacctgcaccagcagaccaggagagatgcaggcaggtaataaagaagaaatgctttaaatagcacatgtgtagaaagaaaaactgactttcatgaacacaagcattctctcccgtccctgctgagaatccccagaagcatgatcccctaattactctccatgccgccactgattggaaggaaactgtaagtctcaactaatcacagccccattgttcccatttcccaagttagtttattccattcaagaagactatgaactctggacagtcccagttagacttcccggagtcaacaggagtcaaagaacttgcatgttatcttaggccagagaggaagaagcctatatgctgaggatgacagaccacagccctgagagccaagagcaattgattagacggatgaaaaggggaaaggaggacacaaaagccacacctcagaggcaggaggggcacaccccagagtctgatggccatcctataagcctttgtgggagctgagctctctggagtctctgctggcctgagagcctgcctgcctgggtgtctgtgcattcattcatgtaacgcacatgtacagaaggccctcttgagaggagcatcgtgctccccatagcaggaactcccaaccatccttctggctggtcttgagactgcacaggcccctaacacctcctcccatatctgagtgtgaggccatctccagccatagcaccagtagccggccaccatcatgaaaaagagttgggccacctgttggtcactgaatgcgagctggcaggtatgtctggtgcactaggggacttacagcaggtgtcagtcctagagaaagtcaagcctctgagagacaggccaactggacaagggccagggtgacttaggggacagtccttggtggcctgataatacctgggcctacatacatctctgggcctctctggtaatcggaacatttctcctttccattttaagaaagggaagcactaaggtcgccccttggacttgtgcctggtggtgctctgggtctgtgattcctaggtccagaagcatgagcttggcttttgctctgcttctccatgccaagaagtgctaacacgacagtcccctgcatgtgtgtgtgtgtgtgtgtgtgtgtgtgtatacgcacaagtacacacatgcagctgctgataatcaaacccaggacctcaagtatcataaccacagagccacatcctcatctcaaaaggaaacattttaataactgtgttcaaattgagtaagtatgttcccaaggtgtttttgttcacatgagtgtgcacccactatactctgttttacccacacacagacacacgtgcatttgtactagcacgcacacacacacacacatcaaaaatgtctaaattttaaagcactatttaaagatcaaatttctcccagggcctatgcttcagaaagtctctaggttgtccaaactgccctcctttgcccagtctatcacaaatgggaacagtgaaagatgaatgccctccttatttggacagagtgagtgcaagttgaaagtgactaagtgcaattgaatcctaaaggaaattccgtgggacctggtgacatttgagtagagcctatggcttaggtcatccagcagtggccttgcatcatggctctgctgagttctccagagtttgccagatgctgccgagggaagctgggcggcgggtgaagggaggctgtgagatctttgcagctcttctataattatttccaaattaaaagcctcaaaacaaagtaacaacggagaaggaagaagtgggatcaacactgcagactggttacgagcagcattcagtattctcagtcctgaagttttacactgtgggctgtggtactttataaataaataccaattattgggggaatagagaagcttccaataccccaccccctttctctgagggttccatctaggccccacaaaacgtcattgccagaattcacactgacaggatggcggacaacctataacctgagagccccacattttgctggatccccctgctgcccaggaagggccgatgccgacccttgaacttgtccccgagtgcgtgacctgatctgttggtgattcctgtgtccacaaacactagccagctttcctctgcctttccataccccacacttacagagtggcttggaacttacagccactctgcaggtctgagccctgcctgatttgaactgaaaataggcaggttaacatgtgctaccacaagctgccacagaccaatgacaacattagtgtgtgtgtgtgtgtgtgtgtgtgtgtgtgtgtgtgtgtgtgtgtatgtgtgtgtgtgtgtgtgtgtttgcctgcatttgtatatgtgcagcacatgcatgctgtatccacagaggtcagaagagagggtatcgactctcctagaatagcggctctcaacctgcaggtcctgacccctttggggtcacatatcagatatttacattacgattcattacagtagtaaattacaattatgaagtagcaatgaaataattttatggctgggagtcacgttaacatgaggaactgtattaaagggccgcagcattaagaacgttgagaaccactgccctagaaggactggcattgcagatcgtttgaaccaccgtgtaggtgctgaaaaccaaacctcggccctctgcaagagcaacgcatactcttaaccacttagccatctccgcagccccttagaatgcttattgacttgtggctggagccagggttcctgtccagcttggccacatagtggaaggacccaagacactttaaactgacttttttgtccttgttttgttttttccgtcaaagatcctccattggttctgatatagccaagtccagaagtcctgtttcagggccgggaatgtctttatgttcccttgacccagatctaagaacaactgattccactagaacttacagtaagggacatatcccagggacctgagacactgtacagaggctaccttcctgaaacatggtagaggggctacttctgaagggcccagtcctacagaaccaaagctgcaggatctccacgacacagggcagcagcaggatatcttggggggagtcccagtgaggatccagtattgataataaataaatcttaaataaatatttatatgaaaacatttgtgggagagaaggcatgtaaatttaaaatttacaaatttaagggggccatttctaacaggttgaggatcaaggcctgccaagttcagatttagtcttcccttctctatagggaataaaaccgggggagggggggtgggcgcaaaggtcagttgtgtagcttgagtactttcctagtgtgctgaggaccatgggcttgtgcagcaccacaaagagaaacccaaacaaacaaatagcataaatgaaattttcatttatccaactggcatccatttagagagtctttccttatattttatttcttaaatacttatagtgttaatttaattcccaaattttaatatctaagttaacagctagtagaagacaaaggatcctctcttaaaaaccaaacactaaataacttcagccaaaataagcagtcggcagaccacaagctgaggcaatgattgttattgcaactaacatttgtctcctgtccccagttttatgaattgcccctcagatggtataactgaatatccatattgtttaggaatgtttagacgttagccattattgcacacgtagttagaatgtatttcacatgccagttaagaaaatgaggggttcacacagatcgtttcaccacatgaccccttgaagtttgttaagaatttacattccatctcttccacaaatgcttgcacataagagttttgcttaagttttagagggattgcatgcactctgggaccacagtcatgtttaagaacacaaaggcagtcacttgaggattatttctttcagcttcttgtatcacatgtgtgtgcatgtgtgtatgtatctcctttgagtcaggtcttattggcctggagctaaccagttaggcaagtatggagagctaggaatccccagggatccaactatttcaggctcccaaaaacagggctttcaaaagcagcccatcacacctatttcctcctcttcctccttcctgctcctcctcctgctcctcctcctgctcctgctcctccaccaccttctccttttactttctattacttctttgtgaatttcacatcatgcatctcagtcctactcatccccccccccccgtgctcctccatatctgccctcccccttgcaaccctcccccaaagaaaacaaaacaaaatctcaacaacaaaaaaaaaaagtgcggagtgtcatggtgtgtcaccatgtgtcacacagtataccctttgtccacacatcttcacttgtgactgttcattgcggtgagtcactggtctggttcgagacctctgacttacttctatgactatcaatactggatcctcgccaggactcctctcaggacatcctgttattgccctgtgtcatggatcagccccttcagaagttcatagatggagtagatgttggggtgggtcaactcaaagccctggatctgggcttcgggatagctgagttggccagcccaccagctctcctgttctcataccctcatggatctgggcttgggggtagctgagctggtcagcccaccagctctcctgttctcataccctcatggatctgggcttgtgggtagctgagttggccagcccaccagctctcctgttctcataccctcatggatctgggcttgggggtagctgagctagccagcccaccagctctcctgttctcacaccctcagggccagctcctctgaggtacccacacacctaccttcttatgtggatgtttgtgtggcaagcattttatcgattaagccatctcctagtgcctacgttgcaattaattgacttgcttgatacaggcccaggagtccaatttacctaaataatgaatgtcttgttggcaattcacctgtgacatactgccacacatgctggttcataaagtgtgccctagccttccctgttctatgtcctttcttacacagagcacatggcattggctgaggcatccacaaagagtctagttgaagccacaagtttatctagcatttaaaaaccatcggagttcaaaagcaatttcttatcttgggagtgagacccagcagcattaggtctgggaacataatttacttaaactgggctcaggggttccgctcattaactcctagacagcaagacagagagagtgagtggctgtagcctaccatgcctgggctgtcatacttgcttctgggaacttgacatttagtggtcttgacagcctctgagccgagcactccactgtcacataccacggcaaacaacagcaccttatgtcgagtgaccagaaatgcgttggagcgtaactttagatgtgtgtagctcacacagatgaggaaggacggtgctgctcgggaaggcactcagtgtgaatgacgagcctggctcttagactgggtgagcaggatggatgcctccagaggacctcatacccggggcaggagcatcggctgtgcctgatgacagtcactaaatctataagaaaatgggtctcagagcagcggggaaagctcagtggatcaagtgcttgctcagccagcgtgagaaccaaaattgacatccccagaacccaaatgaaagctctacaggcgtgaggactcgctttatgccccacccttaggaggcagagacaggggaagctgactaccgtgactagctggaatcagccagccctgactctgtttcaataaagcagaaggtcttccagaaggacatcaacttttagcatgtaatatacacacatgaatgtgtatccatacacgtgtgagctcaagcgcaggcatgagaatacatacacacagagaatatggatcattgacagcctccgagccacactccactgtcacaaaccacagcaaacaacagcaccttatgttgagtgaccagaaacgcactggagtgtatgtccacacaagtggacatactgtaaaattaatacgcttgttttcttacaacaacaaaattgtttagtgtctgctgtcagacacagaaaatgcagaaatgactggcctttggcaccgatcggtcccacgcttatattttaggagtagctaaaatttcacaatatataggagatattgcaaacaaatctaagagagatgtctcatggaagtgcaaacatcaagaccaggttcagatcctcaggtcgcatgtaaatgctgagctgctggcaaggcttgaggggtggagacgttcgctgaagcaagctgactagttaacctaggcaaattactgagctctgggttcaagtgagtgtccctgttgcaatatgtatagaggacagtgaccagggaagacactggacatcacccacacatgaacatgccaacacatgaacccacacatgaacatgcatttgtactgcatacgtgtgcactctacactttctaacacacacacatacacacatatgcatacacatacacatatgcaaaaaaaagacatttagaaggagcctaacagtggagcaaacaattttgtgttaataaaaaaggaagggcagactctactggaatcagtagcctctggtttctaatataccttctcaagcacacatcctgcgtgactctctctctgtctgggtatgaggtattcctaggccatccttggtgaacttgtttacttaggaatccaggatatcaaatgtccccacattctcccatttgatgagctcccagccccacctctacccttccacgcctataataacttcaggctctgggaatgggtcagtctgtgaagtgcaataacagatatcatggagtgtgtttataatcccaacacagtggaggcggagacagcaggggccctgaggtagctcaccattcgttctgcctgatggttgaagactagatgaagtagtcagagggacgccattcccccaggagcaggatctcccacaggacaatcccacctcctctctctctgcccctacccatcactatacattggtttctagtcaacccattaccagataagtatcaaaggaaagcaggacattgtggtatataggaggtggagacaggaagtcaggtgacgtcatcatggactatgtcatacacgtgaggccagtctgggtgagaccctcatttttgttttccaataccaatattcagctaacgacatagctaccccttctaaaacatttccctatggatatatctcctgcaacatccctctccccaaacctgttttcaggagctaaagattagtttgtgttttctagagttttacataaatagaatcgtgtcatctatacacttcttaaactctttcatttaaaacttcttcattcaactcacttattttcaggctcacccagatataccacctacagtgatagcgttgctgcataggattccatatggggattgtgccttcattcattcattcattcattcattcatttaatctgctgctggtaaaccctggaattgttttaagtttgggccatcctagtgtctctccatatacagtgtctgtgaactcttgtgtgagagactatgtagacaaatgcttccttttgtgtggaagaaagttgagtgcctagaaacagaatcatggtttgatcctgtgcagggttacggttaaaaaacctgtggttcatgtggtatctcagctgcttccggtaggacgatgtgaggattgttggcatgttattaaagtgtgtcgagtcctataggaaaagcacacagcccagagccgtagaaagggaacgcaggccaagggagcgagctgcggctataggaagcagttagcacctctcatcttaaggctgtgcctcctatcctgtccccgccagagaacacttctctcgagaactctccccccagacaattcctgtgtgttcctccaatactggaaccccaggaaggattcccacgatccagtgggttctgcctgtggaggccctcatctccaaacccctgcacaatccaacaacctaaccagcctgtctctcctttctccaggggacacttgaattggctccagctcgatcggagagtcctggagcatgacttccccaaaaagtctgggccggtggttctgtacttctgtgtcaggtaggtacccctgggacacctccctgcttccatctccttgttcttcatcagaagagtctagaaggatgaagagactaaaaggaaagtgcagactgagtgtgtcttggtctgtgattaaggataaaagtcatagcacagctgtattccaagaagaggaaaactccccgtatggttgttctgggtccagcagtgtgttaggtggtcacagactgtcacacagactgtgtgaaggctcgtgtgccaaatgaagataaagctttattttagggaagaggatggagagagtcatatatctcagagtaaactgagtcttgtattgtgtagtgagtcttgatattcttttcaatgccacttaaagctctatattaagtctctgtggtttttgtttctgtcacaaatgccactgaaattccttgaaatatatagaatttatctcaaataggactgattgaaatgtcccttctgacaagggaggacaaagtatcaaagatgtcagaggagtgaggagatagctcagtggataaaacacttgcagactttgtgtgtgtgtgtgtgtgtgtgtgtgtgtgtgtgtgtgtgtgtgtagagttaggtggacatagaacttgcctacagtcccagtcctcaagaggctgagacagggagtccctcaggcatattggctagttagacttgctaattctgagatcagcaagagtctgtcttattaaataaattagagagcaatcaagaaagacacccagggtcaatctctggtctccacatgcttatggacacttgcaaacatatgtacacacaccatccacaaaaaagaaaaatacgatacgcatatgtcatatgacactttttgaaaatttcattgttttgtgtatgtataagcatatacatgccactgcacgcatgtggaagttagaggacaacctcttggagctgattctcttcttccatctttatctagtttccagagcccaaactttagtcttcaggcataggtgacaagtgccactaagaggtggaaccatctcacctgctcctagtatagatcttttaggggtctaaccttttcactgtcttctgaagaccccagaattgatcacttctgtttgcaaataggcttagaagcctaaaggagaatcagaatgcaaataagcagcagagtcaggagctagtgcttccagacacatcagctctgagcacccacccagccatggaccccctaaaagcactctttctaaaacagtcaccagtactggagaggaactaggggctttgttttgatttatttatttttctcctggttctgaggcttgaacccagggccttgagtgtactaatgactatactacgtccttggtcttcaaatgagaatggctctttgccaactcctcagaccctgctcttcttaaatacactcacagaaagcagaagtgggggtgcagagggcttgcaggccattcctccctgaagagcagggtcagggttgcagttcagatgtaacagtcctgcctccgcaaacagcatcccccaagtctcaagtaaagagctaaagggtccatttaacaggctgaagtgtgcgtctttacctcagctgccggagtaaatttcagcttgcagttaatgcctttctgatttgcttaacagctgcaggaatatcagagctaatctcagccatttccattactgatgggaatgatctcagtgccatattctctctaatggtgtctcagatgaatggggaataaccttataaaacaaagctaacaattccagagagaggggatggttggatcaggacacacttggttcattaacttatcatcgtaggtggaggcacagacttggccacatggtcggctccccttccttaagcagctttttttctaaaaccataattgagattttattgtttatgctgagagttggtacaaagacattgcaatttaggtgcaatttattattgtagttttatcattgtgcatgaatgtgtgtgtgtgtgtgtgcgcgtgcgcgcgcgcgcatgcatgcatgtatgtgtgcatgtgtatgtgcatatgtgaacatgtgtgaacatgtgtgtgtgaggtgtgtgtgcttgcatgcttatgtgtcacagtgcagatatggagggcagaggactttgcagtcttttctctccttccacctctgcatggattctgggatcaaactcgggttgtcaggcgtgattgacacggcagactctttcctcacagagccatcttgccggcccaatctgtgtgcaattgttaacatatgtactggaaatctgtgtgttgtgattcgctttgaaataattattctaacaactttgcctcttcaaatctggaggaaattttcccccaaagaggcattctggtacaaagatgctgaggtctgtaggtctgaccaacttgcagtttgatgacacatagatatgtgtttgaattgtcactcttccaattaccttagcaaaatcattagaaaactaaactggcagaagcctcacagttctgactgggcaacactcaaggagcagtgtagaaggagtatttaacatgttcgagacctactcagtgcacaaccaggaccccaaactgtcatttgagatgctttacattgtaaactatgaaactgacccccacccctagaatggtaaactcacccccagtatagaattattttttttactgagccaaataataaataattagtaaatgattttatctctgaaaaaatgtatggtgggacgtgaaggttgcacacctttaatcccagcgctagggaggcaggggcggggagtctctgtgggttcgaagccaacttggtttacacagagttctagggtagctaaggttatatggtatgatctttctcaaaggaaaaaaatctgtatggctctggagatagctcagtcaataaaggggttacaggagctcagttagaacccgagttccttttgaaagagctgagcatggtagcaagtgcctggaatcctagcactagtgagaaagaaacggaagaatcatgggattgccagccagccagccagcctagcttacatgatgagttccagaccagtgagagatctgccttcaaaaaccaaagtgggccactccaaaggagtgacattggaaggtgatctcaggcctctacacacgcatgcatgtacatgtatgaacatttgaacacacatacacaccaagtcatttacactttaaaactgaggtgaggtgaaggtctctcactctttaagcactgttccttttcttggtgctttttgtcagtattattgaagaagaataaaaacaaaaagcaagcaagcaccaggcttggccacatgccaaatgttggtacagatgccagctgtgtgtaggtttggggatttaaaccctggcagcaaagcattgagtattgaggtctcttcaggtgtacatgtttttcagggcacccaaacccagtgacaggggaaccgggaatgttcaatagttgctagctatagcaagaactagaaaccagactggccaatgcctgcatggcacctacttctgctctgcagcaggaaatgacaccccggcctactgtactttcagttggccttatggagaatctcagggaatgctcattagaggaaaatccccagtgtggtggtgcatacatgtaatcctagcactgcagaagctaaggcagggggttcaaagccattctgtcgcagaaaaataattccgttggtaggggtgctcagtgggtaaacagctttctgagcaagcacaaagggctgaattcagaccccagcacccctgaaaaaactcaatgtgactgagatctgaggaggtggggcagacggagaggttcctgaggactcatagctgaaatggcaagtactgggttcagtgagagactatctcaaaaacaaagcagaaaggtgattgagaaagacacttggcagtgacctcaggtctgtacaagagctcacacaggtaaatatatacatgggggtatgcacacatgtgcacatataaacctacatgcagataattttttttgatctccaaattccatttacgatcaaacattgcctactctctatttctttatttctttaattgtgtgtgtgtgtgtgtgtgtgtgtgtgtgtgtatgcaccaagtgcccggggagaccagaaggtggctttggacccctttgatctggagttacaggcagttgtgagctacctgggatgggtactgagaagcaaacctgggttctctgtgaagtcaagcacagctcatgaattcttgcctgctctttctctgtacgagttagacaacagatagtctttcctttccagctcctgccctttccagaaggtggcaattttctgagtttagtgttttcctaaacacagcctcacctgagtgctttgagctcatcaggtccaaagcatttgtaactgggccgcccgttctcttttctcccctaacctcctgcttccgtggttctgtggttctgtgatgctgttgttcatcctcttgtgtggactgcacgtcctgagctctcccctgatcctcttcctgtttgtaagtccatggattctccaatgcaaagcctctctctacccttttctctcctgtttcctccctgaactcagccccttatgtgctgtcacatcaactcctgcatcagtgtctccaggtagctgtcatccaggtcctggccgcaggagtctagtacactctgatctgagcctcccttttcagcttgcccaagcagcacccgaacaaactgctcatttattttctccaagagagaaggcagattctccaccgcagtgagctagcttcacagaagagctctgtctagaatttgctgcttctctaatgatgtccccttttgctggaagaagatgctgtcccttatgatttgtccgagaaaacaaaagccaacgtgaatgaatgcactccatcaacctacctccttccctaccgacttgattatatcagcttcatctttgtagaccccgtgtccgtctactgtacacatataaacacacatataaacatgcatatgtacaacacctacacatacacacaaacatacacacatgcaaaacatacagataaatgcacataaatatgatacaatcaccacatacacatatcatattcaaagtcacacaaatacatattcatgtacacacatccttcagaagacttgcttcatcctcttgaagtcactcttcccttttcgttcaataataccaaagctgcagcaagcacttaggttccagctgtccccctgcctcagagctcttcactgctcggctacttcatcctggcttcatcctcattaggggcacatcttctctcactgcctgaaggaagtcctctcccatggtgcacccagccattgctctttctctgctccctccctcatgacgtgtgtcactgctttctcagcttgtagccgtccgcccctctgacatggccctctgtggccctggctgtggctgaccaagcttaccttgctgggctttcaagtctgtggtgctgtgaggttctaatccgaatcttctgtctccgtgcatggctctgccacaggctcccctgctcggctccatgttggtgtttccctcacttgtctctccccttactcttccagtgtgtgtgtgcatgctcgtccctggctcccagtaccctcacttcactgaaagttccacccccactcaccatccctgacctctgtcgatatcccagggtcccctcagctactatggctatgcatcggagtgcagcctaaacccattgacgtcattactttcctgcccctcacacacatgttccacagcagtccatcatccctgtaactgacacggatgctcctacaccagcgcctcccctccacaacccaggtccctgagaatcagcccacggcccacccttccacccgtgcctttcttgttcttgctgcttttacttttctgcatcttagatttacccccaccccacttgccaagcatgcgccattggctgcaatttctacctgcttctctaacccactcccagagctttgttctctctgctcaactctgcttctggccttggccctccacccctcctcctctgctgccattgggcacctttctagaatgctcgatgctaatgatcccccattatcattagcgtgtacctccacctacctgttcagcttcacttctgcctgctcccctctgaccatgctaatcaagagcttgcccagccattgtgactgctgtaagacaaggtctggcaatctaataaaacgggtccagaaaaaggaaatgggaggaaaacatagctacatagccaaggaagtctatgcatatttgtgggcccagatttgtgcttggaaaaattcctacatatcaggagagtgccgtgaagtgtgtattcagttaaatccccaaatttagccgctgtgtttgtgggagaataaatattagatttatctctttagaccttgagttttatgaacaacaaactgaaataaacaataggaaatcgacaacaagggactggctattatctagaagaagattctctggccctgaagatgtctctctccgtgattgagactatagttgctacttcctgttccttgaaaggacaatggtgtcttattggaggtgcctagctaacccgaccttgccttaattcagctgggtccctggttacaaagtaaagcctctgaaatcctaagcatcagaggcacttggctgcagaaatccacagcttaccatccacattattatcaccccctcttcaccaccgaaagtcagcgttccaaatgtgacatttgtgttcattacaaaatgaaaccactggcccgtttaattaacatttgctgtaaatattcagtggttccccaagtgccaagaggtagctagctgcaagagtggcagcagggcaggggcctggcagagctctcgctggctgacgtcatctggatagaggtcagtgtgttacagccttagctcatagcctctgtgaggtaaaaaagagatgccattccccaaggctgcaggcaggtctagatgtataatcattcaagcaaccagaatggagtacatacctcaacttcagactaggataaaatactgagtcccgagtcctctgagctgctgtgggtgtgacatggctcctggaggttaccattctggctggctttgacctcagcctagacggttgctcctttcagctcagaagaaagcactaagattatccctggtgtgtgtggaaaataacttattttaatatgtacattttgtgggctggagaaatgactggcgcggggcgggggagggggggagtaagactgaataagctgagggcatggccagctcaaaggtatggttaaggggaagggtttattataggtgtgaggaagaaaacagccagaggcatctggaagagcatagagcagagaaggcaatagaacacgaccagcagactggctttgaccatggggttagaggagagagaaagagaaggagaagaccaacatggagcaaaatggagagggggtgctgaaatagcagggctataaagagaagtgagtatctggggagggaagcccatgagctaaaggcagcgctgagaagagccaggatgctagcatggactctgaaatgtgtgcttgtacttgtgatgctgggagcctggaagccagcgtgcactttagtatatgagtaagcaccacagatgtgtgccttgtgccagtgataaggggatggctctttggtagagagggaagcagcttcatgggttcctggggaatgctggcttttgtctagccaccagaattcagggaaatggagtttcctttgggcctgacagctgccaggcctggtgacctgagttccctccctggaacccaggtggtggacagagagagatgactctgccaagcactcctctatcctccacagacacaagtgcattcacacacagggaggggtttgccttgctgttcaagtatgatgaagccaacagatcaagggttgaaagtgtcctgtgacagagcccaggagaagaggtgatgtcacatggtgccgggagagttgggaggcaaaggggggaaaagaaggcagtatcctctactgggctttctatggaaagccactgccgcgctgggaaaacaggcttgggattggctaatttaaatgactatgatttcaatgggctttccaacctagggcctttcccatgtcatctggaacatgtctctggtcagaaaggtaggggaccatgagagaagagatggtggcagcatttgagagtcagtagaggttgtagaagtgagactttgggccccttagtcatatttgagagttagagctctgatggccatgggtagcttactagctgtatgaactggctgactttgaagccagcaaggcccagacattcacgcattgtaaagatacggttaatgccgagcagacttggggttgcctgtatagacccttgcagcggaagatacatcttttgttttccctggactcactcagaaactcagaaggttctttgtaaactgtttgaggaagccatcccttccctacatgggcagttaaggaggagcaacagtgccccctactgacacagaggaccacaaaccagatgttcataaaagcaccagacctagttttttggagggggagagaggaaagggcaacctcaacttttcttgcaaaccatcgagtcccctcatttccccagaaatctcttcaaccttgtgcccggccagggtgggaatagagatgtctcgggtctcttttcatccagacatttcacttcagagtttcctagcacagatcgaaagttcaggatgaattaaacgcccaaggttatgaacaaacacatgccaggccccaagcctccaggattttccagtctgttgtcttggtgataaaggttaacaggaaactgctttccgatttctgtcaagaggaggattgctctctctctctctctctctctctctctccctttccccctccgctccccctcccctctccctctcttgctctccctctcttgctctccctcccttccacctctctcctagccatgcttgtcatttctgcacctccttggacttgactgccagatggtagacgtccatgaaaacggaagcgggcgcctgagacagcagggctgccgcctcatttacttctccattaccgcagcgcggaagggagaagtggagtgttgggctcttaggagatagtcttcaggagaaacctggggctgaggaggggggctgaggaggggggtacacaggacatctctgtgctttagttgaggactaaggcaaacgggataaagacacaggacttggaaaactgggctatttcagaccccgtgggcttccactcaaacattactatggcgataagccttccctgccaggcttgggaggtcactggtgggtttttgtcattaagagacaagcaaatcagcagccatgctttatccactttctgtgtagacagggaaagacaggaagtagcctgaaacctggctgtgttggggggtgagaccccacacctgaagttttatgacattttgcttatcatttgttatttctttgtccttactctttctctgctgatgtggcttaaatctgaattatacacacgcacacacagatagatacacacagatgcagacacatgcacacacacatacacacagagagacacagacacacatatacacacagaaagacacagacatacaaacacacacacatacacacacagaaacacacacacaagcacagacacacacaaacacacatgtacacacatacacacagacacaggcacacacacacatacacacagagagatacacacacacacagatacagacacatgcacacacacatatacacagagagacgcagacacacacgtacacagacatacacacacacatacacagagagatacacacacagacacatgtgtaaacacacagagagagacacagacacacatatacatacagaaagacacagacatacaaacacacacacatccacacacacgcacgcacacactcacgcacatacgtttgttgaatgttcggacccaactggtgctgccatttggggacattgaggaacctttgtgacatgggacttatctagcaaaggcaggttgctggagggaaaccttggaggatatatttgtcttggttccagcctgagctctgtgcttcctaaaccatccacgaaaacatgagcaaacctttctgaaagccccctcagctgccacactgtccctgccacgctggactggtgtctccaaacatcaaccccaaatgagtccttcctccttttcattgcttctgtgaggtgttccttcacaatgacaagaaagtagcatactaccccttagggactctgaccaaggtgggacagactgaagaaaagctgagcatcaaagttagcagttatgtcaggctctgtacttgatctagaggcacaaagataacagtggtatgccccacccctcctggaggcctgggttgtcagaaatgacagggctgagggaagtgtactgagcagtgccccaggagctcaggggaggggctgtgcttgcatatatggtggagctgggggtaggggagcaggagctatagcaatgtcctctgcggggtggcttgggcagaagcacggctgtcaggtgatctctgagccagcataaacttccaggagtgcaatcccatactcacccagtcagccattaccccactgtgtccatgtctcactatcaaaacggaacacagtaccagaataatagcagactcccccgaaggctaacggtgacttttccactatgtgataatttgagtctacatttgtggagtctgaaatagctcaattttcaaagtacttccctgtctgtgttgcttttattcctctcgttttctctcttctttccagtttgttattctgcctgccctttaacaacgacagcgcagctagagaacgaccagtcccctctggcaggctttgcacatgaggaccattcagtaaccctttggaattttgctaactctgactttgcagtgagttgctgttgtctgttgatggaggtgaccggcctgtctctgagtgacaccaggttcactggcacctgcacacagtcaccagagcagcttcttcacacacatcgcttgctcgcttagtctacagaccagagaaagggttctgagactggcctgcctggcctgggttttgtgaggagagatttttgctttgtgtgtgtgtgtgtgtgtgtgtgtctgtgtgtgtgtgtgtctgtgtgtgtgtgtgtgtgtgtgtgtgtgtgtgtgtgtgtgtgtgtgtgtgtgtgttgagataaggttttgtgtagcctaggctgcagatgtagctcttgctatgtagctaagggtgactgtgaacttccatttctccagctgggacctcccacagctggaattacaggtgtgtaccactaaattcagttttggcttgttgctgctgctgctgctgctgctgctgagatgatgatgatgatggtgatgatggtgatgatgatgagggtgtggatgttggggctgaggaagctgttttggtttaaattcattcctagtatctaaaaataaaaagacttcttacaaggagatctatcgagtcccactcttctctacagttagaaaaagagaagcctgatacagtgacgtgtcatgccgtaagtcacatggattagatagccaaggttggacctctggtgcttgacttccaggattctcatcatcagggtgccatggtgctgaatggccagggcatttgcttcttattttgcccactttcccctctgcaccccgcttgtctgtctgtttcctaaaatccaagggaccagtgcccatcgagtctagtctgggtttccctcaaacaccctgtatggatccttagaccgaacgggcgggcgcattatctgattaaaggatttaataaactctgaattgatgtatataaaggcatgtttaatacagacttaaataatgtcagcatgtttcatcttaagagaaatttacacactccatccgataagaattcagttctcatttggcttagcatgcacgcctgtcacagccttgagagcacttctcccagcctcgccatgtgccttgggattcagtcatgcttcaccaccctcagggaggcacatcagaagccactgagggccgggtgaccactgcctgctgctccattgaacagaacaagatctcctttaaaagcatagctctacaatgattacaatttttaaaaagtaacatgagagaaatagcagaacaagacattggacatcaggtaaggaaagagaagtagaaggcagctcagagtctgacatcgtcatagttaacgcagcgctgtgagagccacgttcaacctgtctgtggagacttggcttgaaagagctttggagaggagtgtgggacagacagatggacctgagatgccgctggcctctcagctgaagtagcccagtctgcctcagtctaccctcactttcagatgactataagtaatgttttgttgccactttgaggttgggtttatttccttgaaaactatgtgcaggaatttgatgtctcatcactggaaaaaaacaaaaaccaacccccccctcaaaaaaaaaacccatgaaaactcaaaatttatagtgcttgtttattaatacttgttaggtcattacacatgtgcacacacacacacacacacaaacacatccacgttttgcccttgggtgtgaattttagaggttttggggttgggttttaaatcagcgcccagagctggtgaaacagttcttccgtaaagtgcttgtctatccacacaagcgtgatgatctgagtttgatccccagaacccacctggaatcagcaatggtcgcacttgcttataatcccactactgtgggtggaggagcagagatgaaaccccaggactcgctgtctagccaccagagtgtatttggtgagctccaggctagtgagagattgtttgtttgtttgtttatttgttccttaatgtggacagttcttaaggaaccacactcaggtttgtcctttgatgtccataagcatgtgaacacgtgtttccatgaacactgcatacatatgtgagcatacgcatagacacacacacacactcacctcttattaactagtagctcactagctagaactgctttgtcctcagaggaaggctgttgttatagtacaaaaagtcctgtatgtgttataaggctatttaggtttagactagtttacgtgtatgtgtgtgcacctccatgagtttatgtgtacctcatatgtgccagagggcgttgggctctctggaactggagttagaggcagttgtgagctacctgataggggtgctgggaactgaacctgggacctccagcaggtaaacactcttaactggtgagcttcctctcccatcccactattatatatttaatataataaaaatgacttcactgtgtagaaaaataagaatcttagaaccttggagttacatagactgatatctcattaggcttttgatttgcatttccctagtgcttagtgacgcctggactgtattcttatatgcttattggctttgaatgtatattagaaaatgcctgtacacatatgtgtaagacatggtgtgccctcaaagaaggcatcagagacgagactgatggcccctttgctttttattcatttagcactggaaactctaaagccacccagctcaactttagtgatttccacgccccctgtgccttacacatggtttttcctcttgcagattctacatagagagcatctcctacctgaaggacaatgctaccattgagctcttcttcctgaatgccaagtcctgcatctacaaggtaggattgtgctcttcccattcagtttccaaaagaaatagaaaataccaaaatatttcccacaagtcagtttattgattaggaaaagttgtttattaattaattgctattaataaatgagaaactgcatgtgaggaaagccgccggctgaacaacaagacctcttctgatcttgtcactgtccatgcttgggcatgctaggggcgtgttcttcatgggaaggaggtcaaagtagccaaaaattgatcaagtagtcacgtcatgtccacagtgaagagcagacagaatgggatgtgcacacactcgcttgcctgcctgtgctcagctcagctttctatcctctaatatcacagtttggggcccctgtctagggaatgataccgccaacagtggactgggccttcccatgtcagttaacttagttaagaccctcatccacagaccacagacctagcctagacaatccctcactgagactctcttcccaggtgactctagattctgccaggttgacaattaaagctatccatcatacattcatcctatgaaactcacatgaagcacaggcttggacttttatgtgagaggcctggatcctcacagctctcccatgaggaagatgaggcacagggagacttccatatctaacgggcagaaagttactcatttggttcaggggagcccaactgcaatcgccaggtcactctctttgcagagtatacccagagaacttcaaatgtgagcatgtctctggtaaagtgggcactaaatactattggaaaattccaaggagaactcatggcttatgagtttcctatttcagtagatcccgttttgaagcactgtagtggctcaccaaacttcaaagcaggtgggctgagatggggagcaactgccgctttctcttggggaagttctttgctggattgcatgggataattccaccattcagaatggtggagggcctggtagacatcaggttcccctctgcagaaagacttcacttggtggtaactgatgaaccaggacatagactgggctcaaacccagagcacacagacaacagtcctttaagtcttgctgactggtgggaaaagacattaattgtagatccaggttttaaattccttccttccactaatccttaattttcttattatacagtggaaagcatgatagtatccagataccttacaaactataggagcacctggtgggtttgttggttttattgaatgggtaagccctgattgagagagagagagagagagagagagagagagagagagagagagagaaataaagaacaaaactgagcactgtccaccaggtggcagacttgagctaaaatacatggctagaaatcagtgagcttttgaaagggcactcataccacttcctgctgggtgtccatgtataaaggggaaggaagctgtttcctggagttgctcggtttctcttgttcatacctgctgagcttgtagaaaccaagaaaattaaattctcagaagcaaatactacagatttcccaagagcaggtgcaagcagcctctaaaactggcctcatttaaagtccagatggactttgaatggagcaatggtcctctaaagtttgtgtagacagaataacatctcaggaccactgcttaacctccgtcatccaaatattttccttagtaagcacacagatttcactaacagggttatgtgttcatggtgagccttctgaaattttgccaaggaggaggctgatgttcgtaagaactatgagtgaccagactgcagtgccctatcagccatgtccaacagcgtgggacagaaacagacgtccacacggttgtagatatttaggtttttctgtggccgacatgaactaaatatgaatgtttgcctcagtgtcttcaagcttcatttttcctttttgactaaacgccgacattgcaagcccatcccacgtctgggaaactcctaagacttagcactgtgccacacacttagcactgtgccacgcacttagcactgtgccacgcacttgatcaagttacttggattccgatacccttttcttggctacaattttctgtgccacccacatgtcccagctgtacactgagacattatcccagaaggcagggtgatgtgcacataaatattgacttcaccaggagttcagtatcggaccacttgctatttttttggtgcctgactgacggtgtttttctttgcacttgcctgcttgcactttgcagactccaggttgagcatagggccttacccgctttaggcgagtactctaccgctaagctatatcttgggctctctttttactgttttttttaaaaaaaaaaacacaccaagttatccaggctagccttaaactcaccatatagtccatgctatccttgaactaaaatttttctgccttggccccctgaagagctggaatttcagacctgcaccaccatacccaactcctacggtgttttagaactacgctgttgaagtaaaataagctatttaccatgcctctttgcagacctacttccatttatattttaaaatattaagttgtatttttgatactgagcagagcagctgagaggagactccgcagttaagaacacttgtcattcttacagaggacccaggtttggtttccatcaaccacatagtggctcacagttgtctgtaactcctgtcttaggagacctcatgtaccttggtcaccaggtactcacatgccatatatagatgcatgcagacaaaacacatatacaaaataaaaacaaattagaaaacatcttttaaaaaattatttaaagaagtcagggactgggtttaatcagaactaggagtgtgtagtgactagtgagaggccctgtttaatccccaacacaacacaaagtgtgtgtgtgtgtgtgtgtgtgtgtgtgtgtgtgttgttattattaaagtaataggaaacagcttaaggggcaacgagaggtccaatggtggctcagcagtcatagtgctcgtctccaaacctggaaactgagtttgacctcccaggacacacatggcagaagcagggaccaacctcccacagggtgtcctccgacagccatccctgttcacacgtacacaagcacagacactgtcctaaaccatggaggtcaaatggctcctgaaggcccattagcaaaggtgaccatctcctacacacccaaggcctgccctctagagtcatgttgctgctgcttctattatttgccgctttctttctaaataaatgtcccagaccttccagatctgtcccctctccattcatgaattccttgtaagagagactgggatcagtgtgtccccgaagccacccacactctccctctcctgggtttctcggggtagttgcattgcttctgggtaaaagccataacaaccgtcagcgtgacattatgactaacccaagcatctccccgtggctgtgattcctttctttcttttttctttttttaaacaatgagttgttttacctaaagggattcgttgtcttgttttcgcttgtttggcttctctgagccgttggcttttgctcacagttcccacccattcccagatctattctcgtactctgtctcaacatcaatggcgattcatcaacaacctctggtttgagttctgtgactgctgctgctagtgatttcctgagtcttcctcctggaaccctctgccctccagttccaacacgaacttggctgggtttcataactccttcgtgggaggccaccttcctgtctgggtctttccccacccccgctctgtattaggtcatctgtcttctgggttttgtttgcttgtttgttttacactgatgttttcctggacagcatccccaagtaaatctagagaaaggatatccttacacgtctgaaaatgtgtttatcctcccttcatggcatcttagaacagtggttcccaacctgtggtcacgacctcttgggggttgaaggaccctttcccaggggtttcctaagaccatcggaaagcacatatttctgatggttttaggaactgagacaccactcctctatcatctctaggaaggtccacgcacctgtagatgctgtcacgtgagtacctggcatgatggcattgcaccaaccccatcacataccctgaacaaatacaggtgtacatgacaggattagcataataatgtatttaggtggaccaatcatgcatgtgtagagaacagttactatgttgaaagcagcagaattggaggtaaaatgaccctttatgaattataattactaggtaaagtgtgtgtgtgtgtgtgtgtgtatgtgtgtgtgtgtgtgtgtgtaccatgcaaacttaatctggatactgacccatctttttatatacagctgtggttgatatgaatactgccccattgctttagtaacagtagcaaaataggagttacaaagtagcaacagaaataatgttatggttgggggtcaccacaacatgaggaactgtgtcaaatagtcacatcattagttaggaaggttgagagaaccattggcttagcagtttgattagatgtgggactaccacataacagcatctctcagaatatcaggtgatgtattggaaatgtccccccactccccatgctgtctcccaacagctggatctttggcggcctttctctgcattcctcttgatctaaaatttcagtagtgctggtctctgtagacactttgtatctcttggctggtaggtagatacttttattctggagactcatattcttcctgatatctccttgttatctcttccttcaccccaccccccaccccttggaagtgctaggaatcagaagctagggcaggcttgtgtccagggttccatttctggcttttattctgttttctgaaaggcttctgtcagcaatacctttcatctgttcttttggtttttaaccatgatgagtgtgtgtatgtgtgtgtgtgtgtgtgtgtgtgtgtgtgtgagagagnnnnnnnnnnnnnnnnnnnnnnnnnnnnnnnnnnnnnnnnnnnnnnnnnnnnnnnnnnnnnnnnnnnnnnnnnnnnnnnnnnnnnnnnnnnnnnnnnnctctctctctctcttaaatatcctattttcagtctagaaagatggctcagaaggtagaaggctttctgttcatggagaggaacccagttagtttcccttcccccacatcgagcagctcacaaccgcctgtgaccccactccaggggatccagtgccttttactgacctccacgggcacacacacatgcctggaatgcacacatacacacaaatcaaaagaaatatttgatattggactcctggtgtcaacctctagcctctatattcataaaaataatacttgattgctttaagaatataatattatctcttatcattctgattacattaattattgtgcatgctcagcttcctgtttcttctcagtgtccttttttttaatatttgccttttctgtagaatagcatcctcacccccatccaccagccccaactcacactctcttccgctctgggggggggggcatgtatgcactcatgtgtgtgtgcatatgtgtgtctgtgtgcatgcgtgtgtgtgtctgtgtgtctgtgtgtgtctgtgtgtctgtgtgtgtgtgtgtgtgtgtttgcaggccagagctcagcctccattgccagttgctttccaccttaggtggttttagctgtagcagggaatcctagtctgtccattcacagttacaagtgagcaggaaaagctgtcatgctctgaaagcatgggtcaaaataagcctcaaaggccaggggtggggaaaggggctaatggcagctgctctttccatgggaacctgaatatcaacctttggatgagggacataccttcccatttcctccgggacatgccagtctccaggacgtaggaaagaaagcagctttggtttggagtgtaaacttccctccagtgcagcctccactcatctacggagacactgcctctcacccctccgtctgcaggggacggtggctgtctttcattttgttggttatttttctcaagccacaaacacagttttccttccttccttccttccttcctccctccctccctccctccctccctccctttaccaggagtagaaaagcacaactttggcaaattcctctctcactttctcttcctttacacactcataacatctataagaaaatcagggggaaacatcataacttaacccaacttgtggaatattaaatcgtgtgagaagagggcgatcaccatacgctttcagtgaggaaggaagggccagagtggggcttgctgacacactgtgctgtccaacaacggttatgatgttttaactgtctaaatggagacaggtggacagtggggaaaattacgttcaggggacgaacaaacctcctttagaaatgtgtgttcacttccatggaaaattccaacgagatgctgcgcgttccctgggtgaagactcatgagccaggggagttctcctgccaaatcctccctcctgctctcctccctctttgaatgtgactccttatgacaactggagctgtccatgagtcaccctgtaggaggccacccggctgtcacacaagacaggagagattggggacaatggactcttgagttcttccacattcagagtgaggtgaatcgtctgtccccggagttcggtagtgagaacagtgctgatacagtggggtgtgcttgcaccgctgctgatacagtgggctgtgtttagaatcctaacacaggggagacggaggcagagggatcattctagactatataagaagattctgtctgaaaagagttcaggcaactaggggacagtgctgaccaaactggaaaaaccccaagggtccacccccagtaccacacaaaccaatgtgagggcatacaccttcgatgtctacattcaggaagtggaggcaagaagatcagaagcttagggtcatcttccagtacttagcaaatttgaggccagtcacacacacacacacacacacacacacacacacacacacagagacagacagacagacagacagacacagagacacagatagaagcataagactagtcagtagagagatggctcagcagttaagagcacttgctgattttacagaggacgcagttttggttcccagcacccacttggtattgacaacgtcctgaaacttcactttcaggtgatccagtgttcacttctaatctccacaggctccttgaatgcacacggtgcacattcaggcaagcacacaaatgtataaaacaggtgaattaaaaagaaaaaatattcatcacgttcacatccctacaaaagctagcttataagttgatgtcttttttaagttttattttagatggaaatattctatgctaaatttatgtaatatgtctaatgtccttttaaattttatcgattagaaaaaaacgattcccacaaattatgaatcctgaagatacaaaggaaattcaaaagtttttgctttaacttttggccataatctgcttcatacacaaaacccgggagagataagaaaatcagctcctaaatccaaaacaacccttcaattccactcctcagaggagtcatttgatattgatttgctgtgggtggggtgacctaagttttgctgctcagaatggctgccatgtggttgtaaatctcatactcaaaccctgtaactttccacgctttgaatctgctacagttaaattgtacttggtctcagtgtttatctcagctgagccacaagcccaaggtctccatctgaagatggagtaaaatgtgcttcctcgggcaagagaaaggtggcatgccccactggatttttaccaccaccacccattacctgtgattgactaggcatgtggctgatgaacagaaaattactttttattcatggccttccgatcccaccaagcttcgtgcttatatcaaactctggcactgcccttgcagcaagagcagagggtgatggaaaagatagagcaggctgaggtggtccagctctataagctcagcccttgcggatggaagcaggaagatcaggagttggaggccatcctcagctaagcaagttgaggctagcctggactacatgagatcccctttcaaaagctgaagaagaaagggcagagacggtgagagcgggacgaggaagctgggtggggggggagccctgttctgtgtgtgttgaaaggtctcatccagcctttcttctgaggtgtatgcctcggtcatctcctccataggtgggagaaacgaagccctgaacctagttccacaagatgaggaaccaacataaacagtagcctcggaatatcagcctcatgaaaccccatccttttctcccaatctggctaacgaagatgcagtgtgtgtgcctacatcaccaagagcatgaaaatagggacaagggagggctttcttattcagcctttcagaaggaaactcgcatggactggtcatcttggcaatgcatagcagactttggggagaacagttcttgggacctcaacatagtcaggctgtctacagcagttagcagaagaaaccccagtgaaactgcagggagggcgccatgggaatcacgccatgatctgtgcatcacaaggcaaacatgacacgacctgactgctgaaggcctggcacaggctgacaaagaggagctctgcaagtttgcagaggtcctgtccatgcccagacgcaactccacacagtcattatgagttgtgcaatggggcatggtagccaaacaaccacagaaggtagccagggagatcacctacatatgacctcataccgcagtctgataccgtacaccacatcagtcagggttctccacagagaaacatagaaggatacttactgtgtggagctggtccacgtgacggaaggctgagaggtctgtggcgtgtgtagcacctgcaagggagagcacagaaaagttgcagttgtgactcagcctgggggcctgagaaccagggaggccagtagtgtaaatgtcatcccctggatgggagaaagcaagttggatacagtaattcacagagtgagcaatgaagctggatgtggtgggacatagctgcaatctcaggatgtgaggagccgggcgaggcagaaggatcacaagttcaaaactggtctcagctacttagtaaattctaggctcagcacccatccccaaaagtgtgatgaaaaccagggaaacttgctttgcctccaccttttattctctttctaccctaaaggcattggatggtagacgactgaattattgaagtgctagtcttaaggcattgggtggtagactgtgaattattgaagtgctagtcttaaggcattgggtggtagactgtgaattattgaagtgctagtcttaaggcattgggtggtagactgtaagtctacttattcaaatgctaatctcctctgaaaacaccctttaagaaacatccataaataatttttaatctggtcaccaagataaatcaaagtaacaggtaaacactccaattccaacagctgtaaatcacaaccattatctgcatggtgactaataagcacagtgctgcctatctctttaagaaattttgctaagtatcaataccaaaatgcgccaaagtacagaggcaaaactgtgtggttctgactgtctgtagctgccagggtgaggaaagaaataacacatttatggtttacggcacttccagtgtgcttgcagcttctgaatcgcctctactatgttccaacaagctcagcaaaatgatcagaaattgtgttcttcacatttgttggtgaagcaaccgaaactgagggaaatcagtagtgcccggtgtttcgggtgctgttggggagtaaggggtaagactagaactcagtttcgggtgagggtggtcatgaactttaggtggcgcctgggtgaggatgtcttaggcaagcccttggggtgaccaactaagggattctgcctggagtttgccaatggtctcatttccttattcttgttcctcatgttgtccattctaattattgtcatagtttctttcttgtggatgtgtgacataacacattccacaaaggcgtcagtggggtttattctggcttacaatctgaaggcttggtccagtgtaatagggaggtcagagtagcagaagcttgggataactggtcacatcgcatccacagtcaggacacacaaaggcatgaatgctggcattagccccctgtctccattcgcagtccagaatcccagccaaggaatagggccgccatccacagagaggctttccaacctcaattaatgtaatcaagacagcccctcacagacgtgcccagaggcctgcctcccaggctattctaggcgctgttgcgatgataattaacactaatcatctcatttgctgtatgggaaaagttggactttctcaacctaaccacagaggaatgctttcccttgagattcttggtacgacttgaaaagtaccagcaaaccctctgaaccaggtcaggaggccccgttgcatgtttttttttttgttgttgttgttttggtttttttggagcatgtcaagattctctgatggcaatcttcccgagagagagtggatagccaccaagccaccataaagctgctgacaagtgccctgggtcctcctcctgaagttgcttcatcgctttagataaagcagggctgagtgaatggaagtggtccgtcttgtccatcttgtccgtctgcacgaagaatgcacgcatgcatgcctgtacacacctacagcaaaccacattctgtcattctataccattttccaaagagcaaagggaatgatgccctttcactcagtagtgagggaaagaggcccaaaatacatacatcatggcttcagtagccaaaagatacagcattccctctcaatagaacattatcacatgtctgccaccaccctggattcccaggcaagattctggctcaggaaatgacccagcaggagcccctcctcctcaggtgacactggaaccattgaggctccaacacagaactatcaatgcgataagccacaggaatgtcacagcaccagcctttgcaggtggccaagtggaagcctctcacagctctttcttgaagagcctcctacctctcccctgcttctccattttgtcttctgtcaagggaaagcccacagcctcgggaacgtatcggggctttgtatactgtttgttatcttgatcagtttgtttctctgctggaaaagcacaggtagggatctactgcctgggaagccagctaaaagccagccgagggaaaagcagagtcatcttttgtatgtcacgtggcagctggaacctggcaggaagatctctgggacatctgtctagtcctccgtggtggactcggctttctggggaaactcgggaagtgaacagaaactcaaagactctgtttcgttccagcaaaatcttaacagtgtaatcacctggaaaaaagaaatgcaaaggggggttattatttataataaggaaatagtgaacgtattaaagtagaagacaggaagcgcactgtgcagggaggctgtagggaactgaactaaaacttgggagaatatacagtaccatatgtctgaaaattatatgtaaggcatgaactgcttgggaataaataacgttccaaacaagggagaaaagcttggagaatagacaagctctcagcagccgagagccagcctgtcttcctactgttccgagtctggttcctctattctctctctagaggactcctctgagggagggcgtccagtgactgttacactcagtaaatagtaactagggatcctaagaagtagcggcacagcctcctccatcagccttgctctgtgtgcacagtctgaggcctctcatcctggctccctttcctctattgccagacacattctgactctgggtgttttatactctcttcatctgaagggaaagggaaagctcaccctaaagacactcatttccacttaccctaaggacacctataatgagaaagaacttgcctaaactaggtcacacgtttacgactgttgcttaaagcttcgctatagctggcagagcactatacggaatgttcacccacaggacctgcagaatgggctgtgcgaaagcaaaggccttccttcctcccttcccccacctctctttccccacacagacaacttacatctagcaaatgaatcaaattgtgagacaccaaactcctgctcggggctgtctgccaaaggttgattttgagttacacatgagataagtctcccagctggtgttaaccattagccccctgttgaccattcactacaccatagatgtaaatgtttaacagaagggctcacatgtctcacacacacacacacacacacacacacgcacacgcacacgcacacacacacacacacacacacacacacaatgtgcttccaagtaccatgagctctttagcaaagtgatcagtgggaaaggaaatgaataaagctagaaatgatctattgcagaaaccctggagagtttctatgaacatgtttgtactctgtcatgttacgggagctggcagtcccacaactgccattgcaaacattctcccacatcccagctctgaccaggcagatgaattgcagaggtggttaagctgctgtggctcgttacacataaagaatggttgtcttctagtcctccacatggtagaaagacggctgttagttcccttgagctgagtagcaactatctttgtctatctttagaattccttggcctgagaccttgaggatatcccctcttcaaaagatgtggactgctccaatacagtgtcatgagttatggcggacaagcctagacacccccccttctcccccaagactaattagaaaatccatatatcagagtttggcttgtagttcaaaataactctcaatttaaattattcttcagtgctaacttcagttgtaaattttgttctgagagggtgctggctgggactgagaccttattaacttggaaggggcaagtcctaagataaggccatatattagacaagaaattgtggttttccggcacaataactgccattaaggtcctcatggtctgaggcaagtcacaagtttttggactctatcctcagaaaaaaataaatggtgttaagctaacagactagtctctaagtctctcccagctttccctcttgttcagccactcggtatcagatctagtgatacgggacgagaaaggaagatgtactgggcatcatgccttaatcacagcactgaaaggctgaggcaggaggattaccatcagtttaaggctagccagtggtatagagtgagagaaagaaaaagagaaggaagggagagaggaaaaatgaagtcataactttcttcataaccatgaccaaaaaaaaaaaaagtcatggattatcttattgtcacatgctgatggccctgagtctctctccatctctaacactacagactatgtataataaggcaccattcacttaaaggttcattaagatagcaggttgtgttacatgtatactacaatagtacagatatctttggaggcagtggacatatgtattgctgtgatggtgtctcaagtgtgtggtcctgtctccaaaaccatcaaattctatatcgtaaacacatcaacttttgcgcgcatgtttcagttagtgcccccaatggtgctatgtttacaaacataggaactccaggcccgtgtcacttcgtggcagggtgtactctgatagacatagtaactggtttattgttgtgcagacgtcgagtatattaatacagactacagtgcctgtgatgtcactagatgatgtcatctcatgagcccattggagtaaacatgtgctggcattgacgggaatgttcttatttagagtggcattatgtctgtgttcaacaaacatacgttggatttttttttcaaaaaccaagaagtttttattttttaagaccatgtccccctagaacacaaatacataaaagaacagaagaatatttaaattagagaccacactagaagtgactagtagagcctttgtggagacagaaacactaccaatctatattgacaggattgccactagccatcctgagctctgagcacatgggagaactatggctgttactaccgaggacctgtattttcagtcttgccttgtttaacttcaaatcgcatcatgatcccattgtaacatttctttcaatgaacccacattatgtacgttctaaggcagaactcaaacaagcaaacaaaaaccgtagcagggctggacatggttgtattcccatcagtcacagcactcgggaggcagaaggagctctgagttctgagccagctggggctacacagcaagaccagtgagaccttatatcaggaaaaaaaagtgatttaattagttattgagcagctgtgtttcagtgacaagtaagatgagcaggtttgcaggcattgagtggttataaatactggctactcttccaggggacttaggtttaattgccagcacttatgtgtatgtctgtggaccataatgcatatatgcagcctcccctcccccagccttaagggttccactgttaatacctggatggagcttgccggctcaaacgttctgccacgcccactgctggagccccgccgctttgctgttctgaagccatcacgtggtcaccctgctactggactccgagattaattggcgggaatcgggcccccttcccctgcttcataactgcgtgcggaacagtaaaatcgagctttgatcagaatctgcctgtcttagctacatttctttatctcgtcgcctagcccctcttctcttccaggtttccaaaatgcctttccaggctagaacccaggctatgatctgctggccggacacaacacatatagatggcttatagctatctataactccactccaatggggatccagcatcctccttagccttgaatatgtgtctctatagagtctctctcttcccttcctcccttctttccttcacttctccctctatctttcctgctttttcctctctccttccccaccccttttcttttctttacacacacacacacatacacacatacacacacaccttctacatgcattgtggtacacaaacatgcatacaggcaactcccctccatgaaacatgaaataaaaatgacaaagatgagcagatttataaaaatctggacatggtccatcccttaccatcacatccagatttgaagatgacatacagtcttctttgaaaagatcttggggactactcagggccaagtcattcagagaaattgtctaaagaaccaaagacactctaaatatatttgagattctggggaacttccaagaaagaccaggtctcttccataggagctgcagtaagaaagctgtttaagtaccagactaataaagagtgatgtaattcatgcctcagatctccatactcgggggtagaggcaggaggattgtgggtttgaagctagcctggactacatcataagatcttcattctaaagtttttaattaattaattaattattcaaaactaagtagatacaataaaagactcactttgattttttttttttttttaggagctgattgatgttgacagtgaagtggtatttgaattagcttcctatattttacaggtaagttgttttacacacacacaaaaggaggtgtgcctgccactacaaacagcagtcacatttgcccgctgtctgactgtctaaccttttctagccacaagatggaaggagctgttaggagcactggtgccatgccataaccaggatttgtactcttccgagatttcaaggcagtatatggtgtgaccttggggaagttgtacgtgcaacctgcgatcatttggttttccagtgctcacttcctttaagtgtggtaccttcttttgccctaaaaaaaaaagcccaaatgaacacctagaagaagtcacctcctgtcccccagaaaggcaaagtaaaagcctttagcctgagacagacagacagacagagaggcatgggaatattatttgtaatgttggcacgatgagttggagcactatcaaaagttattctcttaacaagtgtttattgaatgctgctgtgtctgaggtagcctaccacactcactgactctcacatggccaccggcttacaattcgttggtataactgggaaggggctcacagttgcagaagtgcagaagtggactgtctgttgcagcctgacacggtggcatgcacctataatcccagctgctttggagtttgggccaggagagtagactacagctgtctcaaagaaagggaagaagcaagggtggaagggaaggggaggaaagagataagggaagtattaaaggagaaagggagagacaaagtggggggagggcgagagagtgagaaggagagggaaggaaggaggaaagagagagataaatatgtatgtaacctattttagttagaccaaggccttgaagtataaacttctatacacctttgtgacatttacagtgtgcctcttgttcagtcagctcatatatgtactctccctgactctgacccatcaggcagggtctcattatgcaaccaaagctaatttcaaactcagaatcctcctgcctgagcctcccaaatacttcttagcatttcttttcattgaattccggagcagacagggtgacacagagggaggccggtctgccttactcagcagagaagtagccatgatggcagggcatggttttaattcttaaccgtggactgatgtttcgcccatttttttttnnnnnnnnnnnnnnnnnnnnnnnnnnnnnnnnnnnnnnnnnnnnnnnnnnnnnnnnnnnnnnnnnnnnnnnnnnnnnnnnnnnnnnnnnnnnnnnnnnnnnnnnnnnnnnnnnnnnnnnnnnnnnnnnnnnnnnnnnnnnnnnnnnnnnnnnnnnnnnnnnnnnnnnnnnnnnnnnnnnnnnnnnnnnnnnnnnnnnnnnnnnnnnnnnnnnnnnnnnnnnnnnnnnnnnnnnnnnnnnnnnnnnnnnnnnnnnnnnnnnnnnnnnnnnnnnnnnnnnnnnnnnnnnnnnnnnnnnnnnnnnnnnnnnnnnnnnnnnnnnnnnnnnnnnnnnnnnnnnnnnnnnnnnnnnnnnnnnnnnnnnnnnnnnnnnnnnnnnnnnnnnnnnnnnnnnnnnnnnnnnnnnnnnnnnnnnnnnnnnnnnnnnnnnnnnnnnnnnnnnnnnnnnnnnnnnnnnnnnnnnnnnnnnnnnnnnnnnnnnnnnnnnnnnnnnnnnnnnnnnnnnnnnnnnnnnnnnnnnnnnnnnnnnnnnnnnnnnnnnnnnnnnnnnnnnnnnnnnnnnnnnnnnnnnnnnnnnnnnnnnnnnnnnnnnnnnnnnnnnnnnnnnnnnnnnnnnnnnnnnnnnnnnnnnnnnnnnnnnnnnnnnnnnnnnnnnnnnnnnnnnnnnnnnnnnnnnnnnnnnnnnnnnnnnnnnnnnnnnnnnnnnnnnnnnnnnnnnnnnnnnnnnnnnnnnnnnnnnnnnnnnnnnnnnnnnnnnnnnnnnnnnnnnnnnnnnnnnnnnnnnnnnnnnnnnnnnnnnnnnnnnnnnnnnnnnnnnnnnnnnnnnnnnnnnnnnnnnnnnnnnnnnnnnnnnnnnnnnnnnnnnnnnnnnnnnnnnnnnnnnnnnnnnnnnnnnnnnnnnnnnnnnnnnnnnnnnnnnnnnnnnnnnnnnnnnnnnnnnnnnnnnnnnnnnnnnnnnnnnnnnnnnnnnnnnnnnnnnnnnnnnnnnnnnnnnnnnnnnnnnnnnnnnnnnnnnnnnnnnnnnnnnnnnnnnnnnnnnnnnnnnnnnnnnnnnnnnnnnnnnnnnnnnnnnnnnnnnnnnnnnnnnnnnnnnnnnnnnnnnnnnnnnnnnnnnnnnnnnnnnnnnnnnnnnnnnnnnnnnnnnnnnnnnnnnnnnnnnnncttacccttacccttacccttacccttaccctaaccctaaccctaaccctaaccctaaccctaaccctaactctaaccctaacccttaagcttacacttacccttactcctagtcccactcctaaccctttcccaagcacagggaaggtatacatcagatctggggaaatacttcaagggataaagcgtttgctatttaagcatgaggacttgagttcaaaaccccagcatccatttaaaaagcacagtatcaactgtggcagcaataggcagagacagagagacccctaggacttgctattcagtgagtccaagctggtgagctccagagaggcatcctatctcacaacagaaagaagggaagtgaccaaagaagacgctgaagtcagcttctgatccctacgctcgcctacacggacggctgctcctgaacacacacaaacaaatcttatttctaccccaccaaaaatgtatgcatgttcaagggttgctgttgttgtttaatctataaatataccctaactagacctgagatgtatggtttcaaatacctcagctgaatggaaagaaagaatttaaaatctaaaacagtagttggcaaactttttctggaaaggcctcgtatctggctttttccaggtcacagggtctccacggcaggtgctgcactttatccaggtgtcaaaggaacctcatgtggctagagaactgagcagcacggctctgtttctataaggctttatttagagaaacgggtatttggatattacataaatcttcatgaatcatagatttttcttcctctccttccttcttttctcttgtttcccccttccctctcctttcccttacctcctgtatttaaaactgtaaaaaccactccaagttcacaggtcatacaaacacaacagaggatggataatttgagcctgtaagttggagttaactgatccgttgctctaaattgtagtccttttatctcgctttgactgttttctgtaaagagtgctccgggcctcctttctctaggtctttggcaggaagcacagagagagagagagagagagagagagagagagagagggagagggagagggagagggagagggagagggagagggagagggannnnnnnnnnnnnnnnnnnnagttagcaaaattccaaagggttactgaatggtcctcatgtgcaaagcctgccagaggggactggtcgttctctagctgcgctgtcgttgttaaagggcaggcaggataacaaactggaaagaagagagaaaacgagaggaataaaagcaacacagacagggaaatgcagagagagagagagagagagagagagattttcactacttaatgagtgtgagaaggcttagctagagaccttgaagttggcacatggccagtccccagttactgagtttgttgaatgaagcttattcggtttgtagaaactatagcttgtagtctgttctctgctcctttcttctgacctgagtttgggattaggcttgaggttttgaacaattgtaagtctgcctactttaaaaggtttctgcagttctgtgaaaacccattgaaagtccgcacattcagcggggtccgatgaaacttctccatcagccatcttagaaccctgctgcaaatagtctttctttttgagagcaccctgacagggtggaatgtggactgggaacaaacccatctgtcccgcagatcatgggagtgcagccacacagactgacagccagggaggaagaagagcagagctttcctggcaagctttcactggcccttgtgagctccagcctgctagcacgttagtcgaaagcagatatgcacagggtgtttcattggtcagagctgtctagaggctttttgtagctgcagctgtctaaagaaagacttggctgccaagagaagggaaggccagacagttcacacaaggtcagcttatctcttcccatgaacttcaccccagagtgccgaggtgagctgtgacagcaagcccctggtaatataccattttctaaagcaggctcgagattggtaacacttcggaattctcagggccgctgtgcaaacatgaggttatatggttcagcatataaaagctgggaccagcattgtgcatgtgtaatgccaccactgtggataagtatggggacaaagacagaaggattcccccagtgcccattggccagacagcctagcagaactgacctacaggtgcaataagagactatctcaaaaaattaaataaataacttagagcaatcagggaagacccctgctgccaacctctgtttccacataattgccagcatatgtcctcacaccccaggaacacacccatgaactacatacattaaaaagaaaaataatcaaacactaagaaaacagcctcaagatagtagttagtatatgcttgaatgttcaaataaggcacatggtttgctcctgctcctgctcctcctgctcctgctcctcctgctcctcctgctcctcctgctcnnnnnnnnnnnnnnnnnnnnnnnnnnnnnnnnnnnnnnnnnnnnnnnnnnnnnnnnnnnnnnnnnnnnnnnnnnnnnnnnnnnnnnnnnnnnnnnnnnnnnnnnnnnnnnnnnnnnnnnnnnnnnnnnnnnnnnnnnnnnnnnnnnnnnnnnnnnnnnnnnnnnnnnnnnnnnnnnnnnnnnnnnnnnnnnnnnnnnnnnnnnnnnnnnnnnnnnnnnnnnnnnnnnnnnnnnnnnnnnnnnnnnnnnnnnnnnnnnnnnnnnnnnnnnnnnnnnnnnnnnnnnnnnnnnnnnnnnnnnnnnnnnnnnnnnnnnnnnnnnnnnnnnnnnnnnnnnnnnnnnnnnnnnnnnnnnnnnnnnnnnnnnnnnnnnnnnnnnnnnnnnnnnnnnnnnnnnnnnnnnnnnnnnnnnnnnnnnnnnnnnnnnnnnnnnnnnnnnnnnnnnnnnnnnnnnnnnnnnnnnnnnnnnnnnnnnnnnnnnnnnnnnnnnnnnnnnnnnnnnnnnnnnnnnnnnnnnnnnnnnnnnnnnnnnnnnnnnnnnnnnnnnnnnnnnnnnnnnnnnnnnnnnnnnnnnnnnnnnnnnnnnnnnnnnnnnnnnnnnnnnnnnnnnnnnnnnnnnnnnnnnnnnnnnnnnnnnnnnnnnnnnnnnnnnnnnnnnnnnnnnnnnnnnnnnnnnnnnnnnnnnnnnnnnnnnnnnnnnnnnnnnnnnnnnnnnnnnnnnnnnnnnnnnnnnnnnnnnnnnnnnnnnnnnnnnnnnnnnnnnnnnnnnnnnnnnnnnnnnnnnnnnnnnnnnnnnnnnnnnnnnnnnnnnnnnnnnnnnnnnnnnnnnnnnnnnnnnnnnnnnnnnnnnnnnnnnnnnnnnnnnnnnnnnnnnnnnnnnnnnnnnnnnnnnnnnnnnnnnnnnnnnnnnnnnnnnnnnnnnnnnnnnnnnnnnnnnnnnnnnnnnnnnnnnnnnnnnnnnnnnnnnnnnnnnnnnnnnnnnnnnnnnnnnnnnnnnnnnnnnnnnnnnnnnnnnnnnnnnnnnnnnnnnnnnnnnnnnnnnnnnnnnnnnnnnnnnnnnnnnnnnnnnnnnnnnnnnnnnnnnnnnnnnnnnnnnnnnnnnnnnnnnnnnnnnnnnnnnnnnnnnnnnnnnnnnnnnnnnnnnnnnnnnnnnnnnnnnnnnnnnnnnnnnnnnnnnnnnnnnnnnnnnnnnnnnnnnnnnnnnnnnnnnnnnnnnnnnnnnnnnnnnnnnnnnnnnnnnnnnnnnnnnnnnnnnnnnnnnnnnnnnnnnnnnnnnnnnnnnnnnnnnnnnnnnnnnnnnnnnnnnnnnnnnnnnnnnnnnnnnnnnnnnnnnnnnnnnnnnnnnnnnnnnnnnnnnnnnnnnnnnnnnnnnnnnnnnnnnnnnnnnnnnnnnnnnnnnnnnnnnnnnnnnnnnnnnnnnnnnnnnnnnnnnnnnnnnnnnnnnnnnnnnnnnnnnnnnnnnnnnnnnnnnnnnnnnnnnnnnnnnnnnnnnnnnnnnnnnnnnnnnnnnnnnnnnnnnnnnnnnnnnnnnnnnnnnnnnnnnnnnnnnnnnnnnnnnnnnnnnnnnnnnnnnnnnnnnnnnnnnnnnnnnnnnnnnnnnnnnnnnnnnnnnnnnnnnnnnnnnnnnnnnnnnnnnnnnnnnnnnnnnnnnnnnnnnnnnnnnnnnnnnnnnnnnnnnnnnnnnnnnnnnnnnnnnnnnnnnnnnnnnnnnnnnnnnnnnnnnnnnnnnnnnnnnnnnnnnnnnnnnnnnnnnnnnnnnnnnnnnnnnnnnnnnnnnnnnnnnnnnnnnnnnnnnnnnnnnnnnnnnnnnnnnnnnnnnnnnnnnnnnnnnnnnnnnnnnnnnnnnnnnnnnnnnnnnnnnnnnnnnnnnnnnnnnnnnnnnnnnnnnnnnnnnnnnnnnnnnnnnnnnnnnnnnnnnnnnnnnnnnnnnnnnnnnnnnnnnnnnnnnnnnnnnnnnnnnnnnnnnnnnnnnnnnnnnnnnnnnnnnnnnnnnnnnnnnnnnnnnnnnnnnnnnnnnnnnnnnnnnnnnnnnnnnnnnnnnnnnnnnnnnnnnnnnnnnnnnnnnnnnnnnnnnnnnnnnnnnnnnnnnnnnnnnnnnnnnnnnnnnnnnnnnnnnnnnnnnnnnnnnnnnnnnnnnnnnnnnnnnnnnnnnnnnnnnnnnnnnnnnnnnnnnnnnnnnnnnnnnnnnnnnnnnnnnnnnnnnnnnnnnnnnnnnnnnnnnnnnnnnnnnnnnnnnnnnnnnnnnnnnnnnnnnnnnnnnnnnnnnnnnnnnnnnnnnnnnnnnnnnnnnnnnnnnnnnnnnnnnnnnnnnnnnnnnnnnnnnnnnnnnnnnnnnnnnnnnnnnnnnnnnnnnnnnnnnnnnnnnnnnnnnnnnnnnnnnnnnnnnnnnnnnnnnnnnnnnnnnnnnnnnnnnnnnnnnnnnnnnnnnnnnnnnnnnnnnnnnnnnnnnnnnnnnnnnnnnnnnnnnnnnnnnnnnnnnnnnnnnnnnnnnnnnnnnnnnnnnnnnnnnnnnnnnnnnnnnnnnnnnnnnnnnnnnnnnnnnnnnnnnnnnnnnnnnnnnnnnnnnnnnnnnnnnnnnnnnnnnnnnnnnnnnnnnnnnnnnnnnnnnnnnnnnnnnnnnnnnnnnnnnnnnnnnnnnnnnnnnnnnnnnnnnnnnnnnnnnnnnnnnnnnnnnnnnnnnnnnnnnnnnnnnnnnnnnnnnnnnnnnnnnnnnnnnnnnnnnnnnnnnnnnnnnnnnnnnnnnnnnnnnnnnnnnnnnnnnnnnnnnnnnnnnnnnnnnnnnnnnnnnnnnnnnnnnnnnnnnnnnnnnnnnnnnnnnnnnnnnnnnnnnnnnnnnnnnnnnnnnnnnnnnnnnnnnnnnnnnnnnnnnnnnnnnnnnnnnnnnnnnnnnnnnnnnnnnnnnnnnnnnnnnnnnnnnnnnnnnnnnnnnnnnnnnnnnnnnnnnnnnnnnnnnnnnnnnnnnnnnnnnnnnnnnnnnnnnnnnnnnnnnnnnnnnnnnnnnnnnnnnnnnnnnnnnnnnnctcctcctgcttctcctcctcctcctgctcctcctcctgctcctcctcctcctgctcctcctgctcctcctcctcctgctcctcctcctgctcctcctgctcctgctcctgctcctcctcctcctgctcctcctcctgctcctcgtcctcctcctgctcctgctcctcctcctgctctcctcctcctcctcctcctgctcctgctcctcctcctcctcttcttctctttgatcttttaaaacagggttcctctgtgtagctctagatgtcctagaactcactctgtagaacaagctgtccttgaactcacagagatctgcctgcctctgcctccccagtgtaagattaaaggtgtgcaccaccccatagtttaaggcttcattttgtatgtgtgcctcttgcagtccaccttgggaaagattctccaaacctgcagttggccataattgttttgctgaacatcaggcatatcagctttgacatttgaattgttttagttctgtagcaactatcttttatactagtcattaatgcaaggttcttttactgtgtgcaagtgaatagttttaacttgtaaatattacctcaacaaacgtcaataaaaacaagaggcagaccattgaagaaggcttttatatatttaccataggatccaaggcttaattctaagataccatagagtctaatggtcttttaaattagtggcctcacacaagagtcaaaggctcagtaattaagaacacttgcttctcttccagaagacctaagttcgattcccaccatccacaggacaactcacagtcacttataactccagacacaaggaactagacaccttcttctggcccttgggggcactgcattaatgtagtatacaaatacgcaagcaaaacacccataaatattaaaattttaaaataagtcaaagttagtcttctacaagctggagagtctccaatctgtcccttcctaaaggcctgtcttgcctgaggcactgggtgtctacactcaaaagcttaagtgtggcctgactctactcctgcagaatgggtattaaaatcctgcaaaccagaggaacatcttcacagaagcataggacaggaggttatctgtgcagtcgagagaggctggacgtgctgacagaatgttcataggcagtcctgaacaagaccttctctgctgcgtcactcaccgcccctcgggttcttctttgggcctccccgtgtgctcagcacatcctgtttctcctatttgtcagtggaaatactcaccttctcttcttacaggtttgggaggttttgtgtttgtttgcttgcttgctttttgtttcattttgttttattacaagataggagctctctacttagtcctggctatcctaaaactcactatgtagacaaggttgacttgaactcacaaagatgggccttcccctacctttttggagtggtacaaaaaagtgtgtaccactccaaccaacattctcattggatgtgataatgcaatattgagttcgtagtgccgaaagccagtggttgagatatagacagttaagtgaacagtgcccaaaatagtgagaaatatggaccatgcatgttgatattttgacacagggtggacaaatgtgtgtggtatcattaaagggttaggaaactgtcttatctaaaaaataatattttctcacttgtattattttccgtagcacagcacaaatcatctccttttacttcctgatgtgtgttcgggtttaaaaaaaaaacaaattgtatgtgtccccactcaggaagctagcagagctggtgtttctgtttgaaaacaattgaatagcctccgagctgtcaatcaaggcagctataggagcgaatgttaggtggagtgggcccaacacagagtaaaaccaaaaagttctcatgtggtcattatgggtcaacgttagtcaacgagcggatactgcctgttatgtatgctagctttcttcatgtcccagtctcttgaatgctcacccttcttgtgtgtggaatatgtgtacacgcgcagatagagcccagaggtctatatcaagtgtctttctatattgctctccacttttgagacagagtctcaaatctgaacctcacagattaactagagtgactggccattggatccccaaaatcctcttgtcccctcttctcaactgggatcacagacacacaccaccattgctgactttttacacgggtggtagggatctgaactcaggtcccatccttacgcaggcagcaatttagttactgagttacctcccaagcctatccggggatgcttttatttataccttaaaaaaataaccttgagctactatagaaaacgaatacccatttcttgctaaagtcattgttaaaaaccaaccaaccaacaaaccaaatgcctgttgagtcaacataaagaaaatccaaacttccaagtgggagtctaatctgacttaacagaaaatatcacagcactgcactaaacaagctattagggacaataacttgattttattttggtttggggacatttttatcatatgggaaagttattttaggacccccactgacccatctctttatactaatcttgagaatcacctcattatcaccttcagttagtttctggaattttctggaaatgtaatacatttttaaataattattttcttattggtcatctactggtcatggaagcacatgcatgtctgtaaccacagcatgggggaaggctgaacctgaaggaccaccctgtatgtaaagtctacctgcaccacagagtgttccaggccaacatgggctacagagtatctgtctcataacaaaaattgttccaatatgatatgataataatcgataacatttttcaaacttgaaacacagtaaatcattaatgtcaaaacccacaccaactctaacataaagaaccatcagtacaaggtggcaaaaggacccatgagagaggctatgaggcttcgtctcaattctatcctagttttttttccccctctctcttttcatggtagataaatgaatagaatgcagttgataactgtgaagctaagagccattgctttggaatggccattaaaactgtatagatcaaagtatactgagatagattctatttgagaattgtttgagtgtcttccttagcctagctgtttttatttgtgatctgattaaagtgatttttttttaatgtatgggtggggagagagtcatcttggacaagtgaatacatctataccatatagaacgttttggtaacaagctttattaaaatggaatcactgaagctctgctgccctgggctgtctactagacctggaaatgccattgttacagaagtctagagatgctgatgttaatcactaaagcaagtccttgcaacataagctgtgttagtactggtaagtcaactgaaaaagactctgagccacactttgtttatctggtggactcgcaatttagcaaatgccacacagttcagaggtaaggaaagacagggagcgctaacgggctcagcgttccagaaaaacacagtcccagcgaggaaaagaagggagagtttggctggctggctggctggctggaagttagcgtctacggtatttactactggctggctggaagttagcgtctacggtatttactactagctggctggaagttagcgtctacggtacttactactggctggctggaagttagcgtctacggtacttactactggctggctggaagttagttagcgtctacggtatttactactggctggctggaagttagttagcgtctacggtatttactactggctggctggaagttagcgtctacggtacttactactggctggctggaagttagttagcgtctacggtatttactactggctggcaggaagttagcgtctacggtacttactactggctggctggaagttagcgtctacggtatttactactggctggctggaagttagcgtctacggtacttactactggctggctggaagttagcgtcttcggtacttactactggctggctggaagttagcgtctacggtatttactactagctggctggaagttagcgtctacggtatttactactggctggcaggaagttagcgcctacggtacttaatactttttgtgctactctgaccaaaatactttacttactacttttacaaaatacttactactttacttactacttttacaaaatacttactactttttgcgcctactactggctggctggaagttagcgtctccggtacttactactttttgtgctactctgaccaaaatactttatacaaacgactgaagagtggacagattcatctggactcacagtttcaaagggttcgatctatggtagtttggcttcaggtcctggtatggaacatgatggtggtgggcaaaagcatccacaacctggcttaaaggaagcagaacacagacaggaagtaatttacctctggaataatttacctctaaaaccctcccccaggaggcaacctacttccttcagctaaaccccactcccagagtttccagacatccaaaatagcaagccccagctagggactttaaaacatgagcctgtggggacatttcaggttcaagccgtagcaacatctgcacacaattaaatgtctatctgtatgagagaatctgagctgatggggaatggtcagtgactgggaagaaatcttaagtgggtcccatagatagcatctgtagggctctacttagatttcttttcaaaaagaaaatcctgctgttagaaacagagccacatatcactccatcagtagagacaaatagcagcccttcattaacacaaaaggctgatttccaaagaggagtttcagctgaaacattcccattaccttccagaagccatgtgttcttaggtccctgggggagtaattaaaagcaaagagcataatgacctcttaatattttattttgtatgagcagtggggctgcatggtcactaggctagagagaaagagactttggtgaacaaaaagcagtcagtattgattcccaccccccatctttcttcttttgaagtctggtctgccccctttggaagtgttatttgtagttactgtgtaaactaaaatgggcttgctgagctccgaaaactctaggcttggaggttcttttagcaagccagagaatgcaaggcatcaactggagcaagcaatatagaacttcctagaaaagacaaaattcttgtaaaaatctttaaaacatgatatatgcattcatatacaaaggctacctttcaaatgatgacaaggttatgtttttgtccagtcggcacaggattaagtgttgataactctaagacaacactattatattggttactctttcatctctatgataaaataccatgaccaaaatcaacttaagaaagagtaatttgttttgatttatggctccagagagacagagttcatgctggcaggaaggtatgacttggcgacaggatcaggacgctgaccgatcacattttcatctacacgaggaagcagaaacagggaacaggaagtggaccaccttaaagcccacccccagtgatgtacttcctcagcaaggctgtacctcttaaataccccatacctgcccaaaacagcaccattaactggggaccaattgttcaacaaaatgagccatgggagacatttctcactcaaaccaccacaactacaaatccaaggctgtagattcctgaagccacagcattttgtttacacaaatgattcacatctaactaagcaagatcagttgttataagtccttattagacctttgatcatttggtgtctgttttcatacaaatgggtatttaggtggggggcagaggaagttgttatagggtcttactctgcaacccaaactggcctgagactcagtatcttcctgcctcagcctcctgagtgctagcattgcaaacaggcactgtcatgcctgactcctacaactgctgaattgccataaaggagaaaatagctgtcattctcctctagcgagagaaatggatttactgagacattttagaaaagaagtggaaaaaaaaaaacacaccacaaaacagagatttatgttgggaatagttcacatttaggatacagccttcataacttggggccagctctgtcacacttaaaaacttcagctcctctcgtggctacttcccaactgggcacggagggggagagatgtcatctgttaaacttgaagcacacctcccaatgaattgaaatgaatatgactctcatatatgcttattgtaaaagaaagagggtgtgtatggagttttctcatgatttcaaaatgacaagaagagccatgagtaattgagaagcaccaggactctgttacgccagctatggctttgaaagggaacagaatttgagagtctgaagtgaagtgttcatacacagagaaaagttataaatgtttccaaaagctttgctttgtgcagagaggtccatttgagctgttgaggatatgatttacatttcaaagcgtaaaaatacgttgatttatttttccaagttaataccattcaaatcctgtgggtaccactcagatataaagtagggagggaatgttgtgtgtgacagtttctctcctttgttaaacatggatttaatcttggtatcacattttcagtgagctctgaccatcacagaggttcatggcatgacaccgtgtcaaattttcagagttgagatccccaagttaaaggctgacattgcagagaagaaatcagttgctttctctcatggtttgagtgaaattatttgcctgaaatcataggctaagaaatcctaacttggtttgcattttatgcatttacaaccaaatgagaagtttgcagagatttccttgtcgcctaggaaaattaaacacacagaagaataaacactcatataatcgggtgattagcatcagaaatggaggacaaacaatccatgaatgtgtcaatagcatgatgtatcagccctgggtacatagccaaaagtcagaatcctgagggaggaaaataacctctgagtccccagatgttttcctggatctacagatgtcaaaagcagtgacagaattttcgcatatctatgtatccccatggaagacctcagtgacatcctcaaatctgtcagctaccctgagcctggctccacacctgggcaaagaatgggctgggaaggaaatggacatatggtgccttttcctgtctttcatatatcacaatctcagtgttgccttgtgtcactaaagaggaaagtagggtggagaaaggaaaaagaaggaagtaaagaaaaggccaggcagtagtggtacatcccagcacttgggaggcagaggcaggcagatttctgagtttgaggacagcctggtctacaaagtgagttccaggacagccagggctacacagagaaaccctgtcttgaaacaaaccaaaactaaaaaaaaaaaaaaaaaaaatccaaaaatccaaaaaatgtgttcatgccaggtggaagagatagtaaaacatacccgtgagttaaaggttggctggccattaaataggtcaagaagcatttgtttcctggagccttgtggctttgggaaatgtgtacaaaggattgcacactgctactctactgagacacattctcttcccagagaaccgtagctttgtaatatgcccatcaaatatcgaggacttagcttagtgctagcagagcattctaatctccccatttctgagtttctgtttattctcttaccctacactagatttgtttttcaaacagtggttttagggaacattcttcagggagtcttcctcattaagcatactcgagagactccaagctgtttcttcaatgtatgaacatttcagttcaccagaggggaatttcttgataatgttatttcctagatttttttaaaagattatgtttttatttataatgtgcttgcccatgagtgcagtgccccatgaaggccagaagggggcattggattccctggagcgggaattacaggtggttatgggctgcctggtatgagtgctgagaaccacactctggtcctctgcagaagtgtccatcctataacttctgagacatttctccagtccctcccagactttgtcttttcttttaaggaaaacatgtggtttgtttaatcaacccctttctgatgcttaactttgtccgtgtttcttttagtgtcttggctaaatatgttgttctttgatgtggcaagttttctgttagtcatattgctagaaatctttttctctcctatagatcactcaaacattagcacagcatctcagcccaccctcccaagtaaaaccattaaagcactgaagtaccatttctatactggcagcaatagcagctacctaaacttcttttcaatacaatctagttgatattaaaaataagactggggatttttttttacaattttttttttaagaaaaaattttaacttttgtttctaaaagtagactatgactatgaagtgttttacagtatggtttagggtagtgtatagcaggcatactgaactctgggggaacatcagtatggcaaccctagacaagaaacttggaagctttagcacatgttttaggctatagctctgtagagtcttaaggtgaagcagacacctgccccattacagtgactttcttccacccaagcactaacaaggcccatccttcctatctaccaaggttggaggcacagtcaggctgtagaacattagaatggctttctaatttcccgatgcacatgttggcaagattgacagggctggacacctctaagtgactgcaggtgtttctaaacagcaaaaaggcaagcaggatatgtctacatactcatcctctggggaggcctgggagtcatggatcccttccagagtataatggatttggatgggcttcatgccctggtgacttttctgtatacttttctgagtaaccttgccctggaggagaacaagcgaatccatggcaagcctcggcaaggacgcgcagcctgtggctgtcatcggggatgtttatttgccaacaaacctgtagctgggcgggaaaacttcagttccttccccaaatgtactttagatgtgacaagcggaggtgcctgagctccggtttcagccccatgaagatgctgctccttgaaaataaaaccttaccccgcacgactgctttttgatagttaaggacccaccctcagcactgatgagccattgaatcagatttctgtgtttgggtcaattcatagttaagtgggcagagaagacgctctgccaccactgtggagtctcagatgttttgtcaactgaatggtggcttaagttacccttccctggcatgctgattaagccattgctgagaacctcttcttcctagacaccaggggctccctctttgaaaagctccaggggctttgcattgtctcccgcagcaccttgaatcctactaagctaccattgaaggtccctgaaatcctgttttcaaattatctttcctgtcccattatccatcacatatcagccactttgattgggctcttctaatcaggttacacacctgccttgacagtaagcatgacctctgtacccctttttacatagcatcaccctcaaaccctgtttttacactaaacccaaaaaggcttttatgtcctcaaaactcttccattgtttgtttaaattaatataatctctttctctattcacactgttggttatctttgaatgaacatctctcattttcttttttccatttattcactttacatcccaatatcagcacccccctctcctcccagttccctgtcacacagctccccccacccccgccctcccctcccctcctcctctaccaccatgagtaaccatgaggggccctagcttatggccagtagatgacaaaccctttccgtactaccaagactataatggcgcaagcttttgggtacatggaatcaaacaactcaaagttgagaatccctttctgattggctgcttcagggtgaatatataaacattcctgtccatatttcttagaaaatttgggaagggccagcaactctaatgttacgcaacagccaggtgatacctagacaccactgaaatgaacttggattctgacgtgattttccccagttgcattgggtgatggagctgctgatgtcactgctggtagtgttgtttccactcccaatacaaagaatttttgatccttaagttgacagcagaggttttaagggtgattgctctccggtcccccctggagctcttcacctgtgtctgtgacctcagtcccattcccctcttctcctcttcctcccctcctcctcctcctcttcctccttccctcctcttcctcccctcctcctcctcctccccctcctccttccctccactcctatttatgtgttgatgtcctttctgttgcttttatacagcgtagtccaggctcctgggagccagtgtttacctagctttatgtgaataacacaaaaagctgccagcatcctcggctagtgctgtgcatctaatgcaagtctccgcaagatgaaccctggcaagcccagctgataggcctgaggctttgggggtgggcccattgcaggagacactatttaaataagagacctgttggcaactttatttctgtagctctgatcggatagaatgagtaggtgatggaataattgtttcaaagtgccagagggtgatcaggcttggtactctagagggcagttaagcatctgaagaaggttgggtgaaacaggggagtttaaactttcttccaaccctgagcatgagtggattccaagcccagctgtatcaatcctcctgatagcactgataatctgcttcccatgtgctaggcattctgcaggcttgttcagaggaacagttgtttacacatcacactgatgaaagagtttccagaatggggcggatctaagccaagactatcagtactgtgtattatggaggcagaaggcgctccagggatgcgctgagctgagtccttttctagtctgtgagcccagctgcaaggccctggaagctcctcccaggagacaccccatgggatccctttcttctcacatccatgcctgatgttgctcagaacccagcacacaatagtgtcccagtgagcgcacaggttccgatgctccctaatgagtgcgtcctaggctctgcactggacaaagaaacccctcagctccatgtgccctgtgttctttctctgtcgtatcacacaaagacaaagcccccttgttcccgtcatcggccatcataagggagcagatgttgggctctcagtgagtcaggtcctatgcagcagggcagttaatttctcggagggtgatgtgatgtttcttgacgttctctttcagcaatgaggtggtgagaagtgatctgaaaaagctgccagcgctacccacccaagccctgaaggaacacccctccctggcctactggtaagaccccgtttcagaaccttcacagggacaagtctcccctcctcaagggcacagtgttcatctaccgcatgcctcctcccctcccatggcaagttacttaggagttcagaactggtttcagagtccgaggtagtggtttgtgcctaaaatgccaggattctgggaggctgaggcaggaggagtgcaagatccaggttggaatgctgtctctgggatgtgggcggtctgcgggcttggagaaacaggggcattattgctttgggagcagaaaaaggaggttgctagctttctccctggtgttgcctatctatctcctgatttagcctccgttgtcactttatgccatagtccacctgcagagccctgaatggacctgcatggagctgggctcgaattcctgaggagtgtgttagaatcctgctgggcacttctgtgctgacctcaagtctcacaaggacagaaacagttccctggtgtttcttctgatgccttctcagaaagcaatgtagctcctgattgtataagtcataatcacggcagggcacttggtgatattggaccacaaccacagattctcagagggctgaggcaggaggattgcaaattgaaggcctccccaagctacagagtgagctcaaagccaacaacttagtgagaccttgtctcaaaaaaaatttttttaggggttgagatataatttagtggtacaagtttgcctagtgtgtatgaggccctccatacaagaaagggggagggaaggggagggaaacaaaaagcactgaagaagttggctgtagtaaaccacaacacagagcacactgcactcttataaatgcattctaaaatttttgaactagtatcctaccctgtctagacacttccaacagtaaagaaaccatctattcccttatttaagtagacttaagttgcctttccatgggacaggtcaggtaacacagagctctttagtgacatgaaaacacctttctctgagaagccccactcctagagagctggactcaaaactgtgagcccctatcagtatccacccttcagttcatcactgacctaacctagcatccatcttcatttggtaatgtaaataaagagcaagctataccaaggactcccaattcaaaaccaatctgggtgagttgaaggccagcctgggctatatagtgaaacattgtctgatttaaagagatgatggggggctggtgagatgactcagtggttaagagcaccgactgctcttctgaaggtcctgagttcaaatcccagcaaccacatggtggctcacaaccatccgtaatgagacctgacgccctcttctggagtgtctgaagacagctacagtgtacttacatataataaataaataaatatttaaaaaaaaaaaagagagagatgatgggaacaacctgagaggctacaagttctcatgagttacatttgcaagctgtgatgctggtagaccgtctggagtcaggatcagcttggacctaattcatccctcagtcctgtcttcatttactgtctaacatggttaaaccaaccccaaagtcaattgctgagttcccccttcctccccctcttcttaccattcttacattgtctccaccagatcctctgtgttcatgctattaggaatacagaaagccttcctcttggttctgctttctgccttttatcaactcgaacatctctacctgaacagtttgcccacagccttcttaccagaacatcctttagtcacatgaccaggccagcccttccctaaggccttacccagacacacgtgtgtgcagacagcggtctaatgcaccaccggcagaatgcggaagctgggcaccctctgtgccacgcctagccgcaaaggaatcagtagcatggaccatcctgatgctaaaagaatccatggcctttccctctgccccaaccctgatgccttgaacagctgcttgtggttgtctctgtcaacctatttcagtgaatttctaaaaagcaaagacttaagtgggggaagatgccatttgtatagatctagcacaaaagaagaagctagaagacagagcgtctctctgctcacccagcctcgccactcagcatcacagttgaccgtgacccctgctccttctcctccatgccatgcagtctccggtggccctcatcattgattaaccaaggctgtagattcctcattcctcctggcttttcattcccactggcacacagagatacagcaactgtcctttgtgccaagaccttttgcatgacattctggaaaagttgtgggtttcatcacagtaccagacaggtctgtgaattgtgaagttataactatcaagctagcgtgtctgtctgtctgtctgtctgtctctctctctctctctctccctccctctctctctctctccttttgcacaatgggagtgaccacaccaagctacattaggctgtacttaacagagtaaataagttgcgctgtaactagaaggcatacaagactcacaagcatactgagccacgggaccagtctcctttcctctacgcggggatgtcatgctatgtgatggcatcctatcaaagaggcatcttaacagggtaaggtggtatgcccagcattacagaacaaagaggcattagggtctgcctggcttctccatcatgagcttgattatagattgccagcatcccaatcacctctacagtatatacacacatactctacagtatatacacacatactctacagtatatatacaccctgtctctgtagtctgacaactcctccaagacagggaaccccatcaccactgcccctcctgccagtcgtggtgtttctgtggctccttatctgcagaggagtaatgtaattttccaacaagacctagccagtgcaaagatgctggtctgccctggtgatgcacattacatcataccctacagccagctcttggggttcaattttctataacagtgagttttccgctgtaattctgtccagtctttaaaaagatcagacatattagggacaccatctacagattgaggagcacctatcccttccacaggttcaaaagacaagtgggaacaagatagagcagggctgggacacgcttgacgagactcacatgacaggcccctgttggcttaatgtagagaaagaagtggagaaaccggaggtgagaggaggtcacctctgtggcttaccagatggctccaggcagcaggtagctggatgaggctggggggcggcagcacttcttgcagctgtcaggccccatgagaccttgtggtccggtcagtagaacagccgcctgtcagtgtttgggactttgtgctgtggatgtttcccaagccttgcttacattcacaacactgtattgactttcagtctcccaaccccacatcaaggatgctcactcccagagctagaaaagaagtaggcttgagtctccattggttggcttgaccacagatttggaagttgacctcatcaaaatcacagttgtgtgattgaaagcatgccaccataggtcataaacttacaaaatgaggcatcctagaagagaacctagataagaaggaaaacagaataaatgtaagagagggttccacctaaattgtgggaatttatagtggacacccaagatcaactaacgaagtgtcaagtataacccttgtaactcccatatgccctgtcatggagcaattacagaaaactaaaagagtgcccttgatggtggttcttcaactgaatgaatcagtgggattcattgacttcaacttcaatgactgaatcagtgggattcaaagtcaaagctatgggagagggtatggaggatgaaacttttagggttgtccttaggaggtgggacacaagggcttttgccaacgactatctccatttctttctgtaggctggctctgtggtccctggggctatagtgcgagctgccattgttcccacctatcttggtacccgtcatgtgtcccaggaaggctgtgctattaccccaaccacaggctattctgtcaaagcaaattttggctagctgttgtcacgaaggagccatctaatttcctgttaattttagaagtaaaacctcagaagataaatgccctgcaaccctgttctattagctagtgtgttgttctccctgggaattttattaaccagagccaagctctgagtccatgactacttagaaaagtttggcctgaacattgggtaggagcaacagaccttctgtgggcaggacctgtaaatggggattgtcagagggagagctgagcatgtttaaccacaatgtcttctgtgagtggtaccaacatttttccatcttttccttttccatggtatctagcaaagagcaccccctccacccccactgccaagcctgcatgccaatcttacccaactgactagcagtctgagataaagataatgtgagtcctctggggagaaagcaggcttttctatgtcccaccaagtctttcagatgtcacgtgagcaacattgagaaatatcatttcaggacacaattattctccagaagttgcttcctccgagattctcgggaggatggacattacaatgtcttagtgctgtgtgtgggtgggatgctcgtctctaatgccagaatcctttcctctaattctagtgaagacagagtcattgagtactacaagaagctgaatggccagacgaggggacaagcaatcgtgaagtaagtgacccttctaaatgctcactacaattgtgtttgggaagtgggaggctgctcagtcagtaaagtacttgcactctaggcagaaggacccctgattcagatccctagaagccacataaaaaaaccaggcatggcaatgtgcattatataatgccaacactgggaaggcagaggcaagcaggtccctcactagacagccagcctagctcagtcagtgagctccacaccactgggaccccatttctgatgtggagagtgatagaggaagacatccaacatcagcttacacatatgtgcacttgtctatgcagatgcacagacccatgaacacatacacacatatacacaacatgcacacaagacgatgtttgagtgtaataggccatatatcgaggctattgatttctacttggaaagatatataggaagaaggaagtatatactaaattccaatttaatatccacttctgaacctcatagcacacagcaaaagaatatgtatatgatagcacttgtgcttactaaccgttatgtgcactgtttgtgtgctctctgcagctacatgagtatcgtggagtctctgccaacctacggtgttcactattatgcagtgaaagtaagtgaactcattcgctgaagcctgtccatcctgtcctgaaaaagcaagcaagcaaagagaagattctcttattttctaacctgaagattttgaggggaattggagttgacggaggttggcttggtcagaaagattgcttgccaggggaaattgagcaactgaattttatccctagtgtattcccacttgatagggtaaccctccaatattttttccttttgtgaagcaatataataaatctctactttctttcggtctcagaggagtcctgggaagtcagggctttggggtgtctcactagaaaagttctatcaagtacaaggaactagaacccaaacactcgtggcagtctattgtgtttctcttggaggtctgatgccacgcagtcagctttccaagaaggaggactggggccattgaaaaagcccgagactgttttcttgaatgtggcaatgtcaactgcagtgtgacatcagcttcattctaaattctactctgttccatccacgctatgccacactgcaagctcattctcacatgatagacaaacatgcctgcttttctcaagcctaagttacagtgtcaagagcagggtggcgtggcctctgggaacttctcttccagatgagaaaggagaatcacttcagaaccagcccataggaatgttgtacaggagggtgtggcccctcaccccagaatgaagtacagtacaaaaggggctcagcatcctgggccagagctcagcaccctgaccactgtgtcactgggtttcctcttgttttactcatggaagtcagtgccattgcacaagcacctcccagagacagcaacgggggtcaacataatgaccttatgctacatatatgtctgtctgtctgtctgtctgtctgtctgtctgtctgtctgtctgtctatctatctatctatttatctagagaggtaggtaggtagatagatagataggtgagtaaatagatgatagatagatagatagataaatgatagatataggaaatataagtatacacacacacacacacacacacacacacacacacacactcctagcatgcacaaaggctctgagagcaatcctcagtgctgaaaataaattaattaattttaaaaataggttaatttgccgggtgtggtggcacacacctttaatcccagcacttgggaggcagaggaagtggatttctgagtttgaggccagcctggtctacaaagtgagttccaagacagccagggctacacagagaaaccctgtctcgaaaaaaaaaagaggttaattttttaaaatggagttgggtagctcagtgctagagtccatatttaatgtgtgaagtcacagattcaatccccaacacacacacacacacacacacacacaaagattattaaaaaaacttacatattcctggaacttcaaataatcctttgttttcaaattgtatttcccttgtctttaatctttgtggttacctctttaagaggaaaaggtgggggctggagaagtgatgctttattggactcaatcgttaggaccggagttcaggtccccagcgcccaagtcaaatgtccagtgctgatgggccagaaacagagggggccccggggctctctaagcagccagtgccagcctctggtctcttcacgtcagtccatgcatgtgcatacacacctgtatacacgccaacaggtatacatgcttataccaaagaagtaaagaagtaattaagttagggatacgggtatcctagctgtgatgctgcttagaaacagagccaaccactcagctcaggctcggtccccagcactgttcacataactgagcaagcacccgtgatggaaacatctgagaagatataacgtagagatgagtcccttctattccagagacactgcctttccccttgtcgtcagatgagccaggaaatcccctcttggtcttcattggccttctccggccccatgttaacctatacttcttttgacaccctaggacaagcaggggataccatggtggctgggactgagctacaaaggaattttccagtatgactaccatgataaagtgaagccaaggaaggtaagggtctctcctctgtgggtctaagggttctcttttgagagcagaaaggaatatatgggaattaacattgtacagcctaagggctcaccaacccaggctaatgtgcatgtatatataaattactccactgtaatcctatccgagtttcctgggtaaatatttttctctccctgtctctaagaaaattttaggtgttataattatcaaaggtatggcgtttggctccattctccaagagcagatgggcaaacaggctctgagcggctgtcatgtatgttctttttcctgggaggctacatgttttggcaaaatggaggaacattttctctcttgaatcctaaggccaatctgagttctccctggtggtttttggaataaggtcataggtcataggtcaaggagaaatgaaaaaaaaaaaaaaaaaacctaagtaaagagtaacaactacctttttggcatcatagaagtgaacagagactagagtcacctgccccagagaaagggaagtaaggtcactgggacggtactcgggtttgaattttattttcattgacacactttcccaaggccagcgcaaacagaagacttacagtggagaagtgctctgggggtgagaatggaccgctggtccattgcacactcccagactgctacccaagcttctgtatctgtgactaggacagaaacttatctaggctgaccacactctatgcacatctgggctgaccatactttatgaagttggcacttgtcctgttagttgccttcttcattgaatttatatggggaaatagtgtggtagaaagaatttcactcacttgatcagttccgttccaaggacaacgatggaggagctttgtgtggcaagctccaaaacctctctgttttccattcacacacaagaaatcaatggtgccccagccccagcctgcaatcctgtaccccatcctcactttgtctctcctggtacttttctccgcctggcctctctaatgctttccctgagttttcttctccttcacccaaccccttcctctccagccagccagatggatcctttatgttttcttttacttggaaatgacaaacacacccccatcacctttcacagactcctggttgcaatctgtgcagctctgctttgtcctctttggacacagaaagctaggggggcagggggatgtagcttttgacattgtcagtagtgtgcttgatggacacccaaggaactgtagtgagtagtaggcacttaggtattcagttggagcttaagagcattgagaatttccaaagcttaattgaacccaggccagcatggctgagacccacagtagaattcagtcttgccctctaagcagtctgtcaacggctctcagcgttgtgagctgttcagttcaccatagtcgtgtgcaggagaattttttcttactctctcttaagtgtaattctaatgaaagtaatacaatagcccttgataaatgcaaaacaccagagagacacataacatgggctcaataaatctttattagtaagacccggtttggtttccagtgctcacagaaggtttttaaagaaaaaaaaaaaaaaaagagttatcagcagagcatcagcggagagggaaagactgacagttggatcccagaaaagtcaccagcattcatagaaatccctgggagacaggctgctgatgattgggtggtctcaggtacaatctgggggtccttgggaagtgagtgctgagtataaagttaggaaagtactttcaaaaccccatcaggccaagtgacacctcttcttcatcagctgtgtgtatggtgtgtgtgtgtnnnnnnnnnnnnnnnnnnnnnnnnnnnnnnnnnnnnnnnnnnnnnnnnnnnnnnnnnnnnnnnnnnnnnnnnnnnnnnnnnnnnnnnnnnnnnnnnnnnnnnnnnnnnnnnnnnnnnnnnnnnnnnnnnnnnnnnnnnnnnnnnnnnnnnnnnnnnnnnnnnnnnnnnnnnnnnnnnnnnnnnnnnnnnnnnnnnnnnnnnnnnnnnnnnnnnnnnnnnnnnnnnnnnnnnnnnnnnnnnnnnnnnnnnnnnnnnnnnnnnnnnnnnnnnnnnnnnnnnnnnnnnnnnnnnnnnnnnnnnnnnnnnnnnnnnnnnnnnnnnnnnnnnnnnnnnnnnnnnnnnnnnnnnnnnnnnnnnnnnnnnnnnnnnnnnnnnnnnnnnnnnnnnnnnnnnnnnnnnnnnnnnnnnnnnnnnnnnnnnnnnnnnnnnnnnnnnnnnnnnnnnnnnnnnnnnnnnnnnnnnnnnnnnnnnnnnnnnnnnnnnnnnnnnnnnnnnnnnnnnnnnnnnnnnnnnnnnnnnnnnnnnnnnnnnnnnnnnnnnnnnnnnnnnnnnnnnnnnnnnnnnnnnnnnnnnnnnnnnnnnnnnnnnnnnnnnnnnnnnnnnnnnnnnnnnnnnnnnnnnnnnnnnnnnnnnnnnnnnnnnnnnnnnnnnnnnnnnnnnnnnnnnnnnnnnnnnnnnnnnnnnnnnnnnnnnnnnnnnnnnnnnnnnnnnnnnnnnnnnnnnnnnnnnnnnnnnnnnnnnnnnnnnnnnnnnnnnnnnnnnnnnnnnnnnnnnnnnnnnnnnnnnnnnnnnnnnnnnnnnnnnnnnntactccaacttgtgaaaaggtggtcaggcagagcaggtgtggctgcatccctagatactgagagctggagtgttcccaaacacaagaggacgagtgagctacaggagggatggcctccaggtggtagcacgcccttctggcactggggccaggtacatctttcaccaccttaaacctccaggggtgctcaggggatgatcagtgccaagatctaagtacccaggggcatctgtggcaagaactgcctctcctgcccaggcagctctacccacccagcagtaaacagaagccctcactgacactctgaccgacttacagcagctgtcacgtggcaccatcatactgagcgccagccttcaggttgaggcaatggcgatgttaggcactccctttctttgaagggctgagggctctcccatgccacctgtgagcatccatacaggcgcgttcccatagggctcatgaaaaatgtctccctaaaccctgagagtccagaggtaatggccatctcaagtcagacagacagtaggttggtcctagttctctgggggagatgcagttcaccgttctggtttcagtatctaccctatgtcagagtcccactctgagtagctttggaaaagtgaactgcaaagtgggagggggaggggcagctaggctggggtaaaagaaagagctatgcttcctgctgttcataacccacaatgcaggacctggatctctccaacaagcagattcttctcttcctaagtacagttctgagcttcatttcaaaacgtttctgaaaagccaggtgggtgctgagtcacaagcccataaccccaatactctgactgcgcagctgtaggtcatccagggccacatatcaagatcccatctcaaaacaaaacaaaacacccaaaaataaaacaaacacagaaagcaaacaaaatttaaatgtaaagcaaaacaaaaacaaatttcttttctagcttccactcccccaagcacagccctggtgtgctttgtcggaaacagtaaggcacgtcggggcttttcagacttgtgtcttgtctttcgaatgtgttcagaaaaaaatcaaaagttctaaatgaagacagggtaggagcctggaggcaggaactgaagtcggggagctgcttactggcttattttccatggcttgctcagtgttccttcctatacaccaagaccacctgcccaggagtggaacagcccacagtaagctgggtgttcccatacggctcattaatcaaggaggtgccataggcaatttgatggaggtgtgttctcattcgaatggtgtcttcccaaatgaccctagcttgtgtgaaggtgacaaaaaccgctcagcacaaatgctgtgcagagaagactcaacccccaaatgccctaaagtatcagcaaatgggatttaaaaacaatgaaatctgccacgggtgtgcattcccttctgcaacgctccttgcttgtatgtatgaggtcgtgtataaagacgaggcagaacccccaaaagttgccgagaatacattataacatgtcctgtgagcttttgcagacaccctccacccactctcaggaaatattgcttgcatccttgacccagtgaaattttcccttttaccttccaccagcctcgcagatttcagctcctgccaatcatcacataccacattccaataagaaacatcccttagctaatatcactcttgccaatgggcagttgtcctggatatctttgttatgatgtagaatcagaggagggaatgacacacatacacacatgtacacacatgtacacatctgtcttggcttagcaataaaagtgaacaacgagaggatcatggagaccaaaggtcaccccgcctctccataggttatggtctcctgcttcctcccagctgctaaccacctttaacatttgtgtagaaataactcactgcctaggttgctcttgacctccggattaatgaaatggtacccagtggacatttggccctgagggtcaatatcagcctacctcttagtttgcatttgtggtcaagtactgagacttttagcacatcaaaacctgaaacccgcccagcagcagtgacgctggctgtcacagcattctgccagttatgctagtagtaaaagcaagagtattttttttctttctttcttttctaaagcatgtgaatgcaaaaataaatgccatatttccgaatggtcttgttgattcagctggcagcatcaaggtcttagggggcataaataggtctgtctcccaaggagctccctgtaaagaagagatcctcacattccttagatcaaagcctgagggaacaacagctgctttaatctccgtgaccatcagacccttctgtgcagccccagtcacagaggtgtgggttagttgtggctaacggctcaatttcattaccgggatcaggatttgtgtgaaatccttctgttttgcaaccatcagacctgtggacagactgaccctctggccgtcagaagccacgataagaagaaagcagaaaatactaactcagtggggctttgagacagcccagggtgaaatgtgagcctcaacagacaccttcctatagaggcagtgctcattagccacagatcagcacttgcgattctatccttgccatgtgtattgaatgaaagctatcctttgggaagggactggccagtcaggccttgttacatattcagtagacagcatttacttatttatttgatgtgcacttaggggggcttttatgtctgcttagatgcacaattagaagcactcccaggtcccttccaaggcattaggaggaggaatccaagtatctggagcatccggagcagccagcgtggcttcctaagagccctgagagtagttcagagacagggccggtggctccagtatttgatgggttcttgtcacctcccccagatgagtaaagatttttttttattctattagatgatgagacaggaagcgaaaataatatttacaggaaatattccattagctatgagccggctcccagggggatggctctgctcaatgactcagagcgataaggatgctgctcctcgctgacttggtccagcttctgtttgggcagctttgactcattgctggctgcagagccctctaactttgcctgtccctggctaggtgccttgcttctcccagcttgtctgttctccttggaaaccacacctctatacacaccagaggaagctctagttaatgtgtttagcattctttgcagccttcctccttcacggttcaggatcaaagagccaccccttgtctatcgttgcttagatcataatgctaagctgagtgggcctgcaaaggctcagtgcctatggctgacactggtccttgcagtgggtcagcagggagagctagccttaaagctgtagagcaggtacgtagaggagatggatgggggaaggacagaagttaccagaatgactccaatccaggaacagtggctcagacctggaaccccagcacttgggaagcggaaacctggagtttcaggccagccttggctacagagcaagaccctgcccccatcaagggctggaatgtggctcagaggttgtacgcttgtctggcatggccacatacacacacacacaagtgctttttaaaccagcaacctttgccaaagtgaatgatgggaatttgttcacatctggtgtggggctggggagctgtggctcattagcctctacgcgtccctttactgtgacgtggtaactgaaaggcacagacaggatggatgtaacccagttgtctccaccttgagtgagttcacttctccaagactctcccactgtcaagatgagggagcatatacccttggcacagcaaccatcattacagtctcatctgcccttggcttagcaagcatcattaccatctcttttatactgaacctgacaggcagacagaagcacaaacaatgcccctttgttaaggggagattgcttcctcggttattgagtctgggaacccagggtccctctgttcccacaggttactggggagcctcttctgagcatgcccagggcaccagctcatgttgcactcttctgggaagagtgttcctatcagcctgttgctacctttgagaaaaacatttgtctttgagcagagaaaaatctcacattgtctcacataggtggataagtttgttttgttttgagataacaactcactagataaccaaggctggatttgaacttaccatgtaggccaggctagcctcaaactctaaatcatccagtctcacctgcccatgtagctgtgactacaagcttgtgctacctaccatacctggctcctgtgtgtgtgtgtgtgtgtgtgtgtgtgtgtgtgtgtgtgcacctgcacaggtgtcaaaggacaacctccagggtcattcctcagacacttaaccttttcctcttgagacaaactccctcactgccctagaattccctatgtaagctacactggccatccagcaaacctgcctgctttgcctccacggtgctgaaataaaaacatacgacactaccacaccctgctccccccatatgggttctggggaccaaactcaagtccttatatctgcaagggaagcacattagcaactgatctatctttagcctgagaacaccaatttctagatagataaccccatgtctaccttaaactgttctctgtatgaaccaatgcccaagccagatctgattagatggctagggtagtttccttccccatctgacatgtctgttgtggcatgtggtctccctgggtccataaacttcctattccaatgcctagtctcctagacatcttgtcctccctggccctacagcacgtgcaccgacaccgagaaagaccatataaatagccacattgatggtgtggacagtaggggtcaaacaggacactgggtatttataacactcaaataaacacccagacagacaacatagcagcgcccatgagactggcaagcttctgaactttgcggacagattcccactactctgggagccctgttgaccctggatgcaatttgaaggaagcaaattaaaaccaagtgctccagttggatcccagatcgctgcaggggagcattcagtagccccactcgtgccaaaagagccacaaaccagtggtaacttctaaactgactttgtttttctggctccaaaaccagtgacttctcatggaataacaagaacatctaacccactggaacaccgctcttttatctcacaccgttacttgatgtgtctctccttgccccttgataaagccacaggcagtcttttggctccactggtaatccccacatggtcaaagtcacacagccacatgaagcagctaaacaagtttctatggagacagtaattggtcgagagagatgctccagcagttaagagtgctcgatgctcttgccattatcaacgttcagttcccagagctatgtcaggtggctcacaaaccgcctgtaacttcagcaccaggagatctgacagctgcttcgcttcccctgagtacctgttcggatatgcacatacataaatcaaagtaaaatagagattcttttaaaaattaaattatcatgttcagtcccaagagatgctaaaagattccatgttagtcagcttttgggtgctataacaaaacacttacaaagatgaagccctttatacaatcgttatacaaagaccgagctcgtagctttcgaggttcaggctgtgagcagttggtgctttggctttgaggcctgttgcaagatgaaaaccacagtgggaagtgcatggcagagcaaactcactaacctcagccacaagacacaaagcagaggaagggagagggccagagccccaaaatcctctccaggggcctgcctactgccagtgacctaatgtcttcccgtgtgtctccttcctaaggatctcacagccaactctcaaaggcgccaccctggtggccaagcctttaacacaggggccactgaggaacattcaatatcccaagtgtaaaggggggtgagatggcttactaggtaaaggtgctcccaaccgatccccaagacccacatggtaggcaaagagccctgactcttgcataatttgctttgagcttcacacaaacgctgtggcatatacaggtctcacacacacacacacacacacacacacacacacacacacgtgcataaataggaactagataaataaatacattaaaattttaaaacatacagatccaatgtatagtagtcgtaatgtgcagtctctcccctgtctactgagttctgcctgctgtgctgcagtctgtgagtaaagaattgaaggatcacctgaccataaggcttcaggtgcatatggagaaaaccatcgggcacccccactgacatagacatagagtctatgacattgacatagagtgtcttattggcctgaagctcgccagctaggtaagactggctagccagcaaacctgcctccatctccctagacccagaatttcaagggtgcactaccacgcctggtattttgtgtgggtgctggggattgaactcaggtccttgtgttttcaagacaagcactgcattgactggaccgtcattctagccagtaaggtttgtcaaacttctaacagacttcatatgacacaagtgagtgtgttacagctttcgttgcacagctcagcagggttgagtgcgttgacagtgtggtgcaacccatcttcagaactctttctataatacagatctggaacttttaactgcagtgccccgtttccccaccccacccccatatactccgcagcctctggtggccatctttctgattcttgtatctgtgagtttgactcaactagttggctgcctatgtttgtctttgggtaaacatatccaattccaggaaatatttcagaatgagaagggttcctgaataggtaataattatataaccaggtcagatccagggtccatgtcacccaattgagcctgctttttgacctttctacccagttcttggcccctgcttgtggcctttcctgcctggtggtcaaatcccaaggctctcatgaaggaatgttcatcttgagatgtcactcaagacctctgttttacttatccttggatctaacgttcagtggccagggtcactgcagactgtaaaatctacgacaagtgagacagactacctaacagccgaattattttctccagcatatccaacaggtgtttctgctgcctaaagttctccacctatcctttgcccaatctgaagggtgtatactggcattttattagcctatgtgcccctatgcccactggcatgtgcacccagcttggttgccatggcttttttatgttccagccttttaatgagagggcaaagtaccaggaggcccccggactccgggctccataggtcctcagtttggattgaaaccaaacaccaaccctaccttagaggcggcacagctgagcgagtttcctgtgcacctgtgtgtttctaatcacataattgagtttatggttgacatttggaaactcattaaaaaagaaacctggtcactggccaggtttctcaccagcagagtgagaggcttaagctgctgagagcaatgagcacccagaggtgtgattgccctggttgctcatgtactcaaggaatgggggcggtaagttgtcatccagaaatgagagaaggggttcccacagcaacaaggagagactcctatgggaaacaggtgctgctgagaataaaggagctcctcttatagctgagctgccagctccttttatgcagttaatcttactgaggtgtgtttgttccagtacagtgcattagacctagggctttctttgtgctaggaacatatgctagcatgagcctctgagctccatttccagaatacattcattcattctttctcctcccttcacctccctatttttagtatgggtgctagggatatgagcttgggtcctcttgctttctcagctagcacttcattatatcaaatgaaccatctccctaaaccagtagtctatccctttttatggcagaataatattctttggctgctgcttcagccccttctgcactggcatacaacagacacacacatgcagatgttaatatctgctcagtccctcacagagctcacaactgaccacttttgtactgatgccaacctttccccaaccctgcctgcttgttttacatttgtccttgagcctcttgtcctggcatcgactgccctgtgagtagtgagtcaatttcttatttgtttatttttgcctaatgaaaatgcacagaccgcttctatccttgcctcatatggtatataaaagatactaagcaccatgcttggcacacatctataatgccagaacttaggaagttggggcaggaggattgctgtgggcttaaagccagcttgaactacatagtactggcccagccagtgctgtatggcaagatcctgtttgggcaaagacaaacaaacaaataaacaaataaaatgcaattggagtaaagtacctaatagttgcaatccagtgccaattttaaagagatccaaacatatatgtgttcagtagcctaagggacttaagtataaactggataactctcaaggaagggtctcaggcactcacaccactgaaacactgagacatttgcaagggagggcggaaagggagcccacaacgttttaccacttatttctgcacgtaaaaagaaagagagaagaaaggcgaggggacatttaaaaatggcttccatttcgactgacctttggctttgttttctgactattggactaaaaagaaatcaagagctagtgacagttggcaatcaagattgcgctcctgggatccttcaggccaccagacactttctcttttatagaagcggaaagtgttagattgggaaaccctggtgtcaatcatcgaagagtgcagcagcttactgctgatgagctgtgcactgctggaaagatttttcttaatcagcatggttcactggggaaagccagggtgccccgacctccctaaaaactgctaaacctgtttaacacccatccccagcacagctaggacccaataaatacagttttcctcactaggcagagtctaagcaacagatcctgctaatcagccaagaatctactgctgggatctgccctgctcagattgtactgagaaggaaccttgagcagacaggcaatttctacacacgatgagctgttcagtccaagcaggaggagaattccaggattctggggttatagacatccctcgttctttgggggatcacactgagtagaaataggaagctgagttcttgaccactctttcctcttggtctggctgtgactgccccttccgcatgccatgtgcagttgagggagggtggtcctgtgtatacacatatgtgcgtatggtgcatgtgcatgtggaagtcaacattgaatgttgttccccgggtgccttccatcttgttttttgaaaacattggaccggggctcacaggttcagctaggctgactgaccagcacatcccagagccttcccgactctaggatggtacttccgtgccaacatgcataggttccgaggctcaaattcaggtctccatccttccacaccaaacactttcctggctgagttaccttcctaaccctggaagtgcacctttaatgaagcacccgccttaatcggtgttccctactttgtggaagccgcctgagttggagctctagtgcacgtggtggtcacatgccatcttgcgaccttgcactgtggtcacatgccgtcttgcgaccttgcgctgtggtcacatgccgtcttgcgaccttgcacgtctctgaactgggtttgccgtgactccttcctccagttctttctctactcacatactcagcctacagttactgggtagcaggtgagagactgacttgcctcaagcactgtacattccctaggcttgagcgtggcggagacatctgagtgaaaggtcagctgcagcaatggatgctgatgacttaggcagaggggtgggtagagctagctacctgggagaactacccagaccgggctgggaagcctgtgattacaggaatatccctgatgagaggacatagctcagggcaggctgctgagcatgctcggttgttttcctctgccctccccagcccctgtaagttcaggaaatcttcaaactgacccgaccacttcagaattcctcctgggggaggagaaggggaatgggataccagagcttgaaccctaggaccagtcattctggaatgactggaatatgggagttgaagtcttcactcctagaacttagcatcttctttctggagaaggcatggctccagcagggaaatccataaaagaatagcaaccaggacctcagctacagagagggaggctctgcccaggccattgcatgcctcagaaaagctgggtggtcagatcttgtagcaaaaacctcagaccaagctgcctacttcctgccagtgacaggcatggctgctgagcagcctgcacgacacaaagggttcatcctttagctggccgggaagcaagccggagatctgcttcctgccaccaatgtagcagcctcaaaccagatccctgtccaagtggagaggtcttgcacctcaattctcagcagcatgtaaggagcctcccccagtttccacataaaccaggtccggaggagctagggattgactcagttggtagagtgctcactagcactgcgtagctgtgcacagtgtaaccccagcccttgaaaagaaaaggtaagaggatcggcaatcaagcccatgctgggctacaagtttcaagacaataaaataaaatcatgttctgagtggtggaacacacctttagccctcgcactgcggagacagacaggtggatccctgagttcaaggccagcctgatctatagagtgagttccggggcaaatggggctatacagaaaaatcctgtcttgacaaaccaatacacaaacaagtaaataaaatcagctcaaccggtttaggaagtacctgtccttgtcatcaagaagggcagttcttgaagcaccaggggtgtgaatatacaaacaagatgctgttaaataatggtccttaaagggccctcgttcccttgctgcctttcttttcagtccacacgggtgatggggtggatcacctttaaggtgagcagctattcactggtaactgttgtcatcatcttctgcctcccatctcagctttccccagggtcaggtgacctccaccaagggggtgaggttgttgaaatgatgcctcgcccttggaccaagcacctcagtacccgagtactgacatgctcgcctcgaaaacaaatagaaaagtacaactttttccacacaaactaactctgtcctccaaagtactcaaacactacatggaaatgaacactttagaaccccttacggcttcctcagtacagggaccaagtccggaggttgacacttagtcaccccctatcttttctcggccaaggattagttactcttcccactgctgcagaggcagcttgaagaaggacggctttacttggcttcacagccggcgcctgccagccggagcagaccttaactggttacatcatgtctaactctcaggaagacccaagagacgacactggtacttcgctcggcttctccttcccattttattatcctggacttcagtcagaggaattgtggctcccacgttcagggtgggttaacttggttgaactcccttagaaacaactagcaggcatgccaagagctgtgtctcctaggtgactctaaatccaacctgaatcacaatagtgactgattctacctactaaggaaagtctttttaagggaggaactggtgtgccacatagcactggggcatagtgctcacacggaggaagtctagttaaagtgcatgtttcacaatgcaggcactgaccccatccccctagagccatgctcaacgaggatgggggggggttggtgtgagagtgggggatggtaattatatctggaagagaaaggaaaacacaaacacagtgcctcctgaaagtattcatccttgctgaagcttctaaactctttctgcaagaaaaagctgacatggagaggagaaagtcatctagagacagctcctcaggggaagaagacaacaagaaatcaaatctagtggaggaggggagcaaatggtctgtttctctccaggctctgttaaggattggctggcctcctaatgattcttaagctaaatgaaactaaaaggtttttgatgggttaaaaagaggccatccattaaaaggtccatgttccgcgctctgggcatctgtcactgggttaaccatgttagtttggagtccctggtgtctgacagtgaaaggggaggggagaccaggctgagtaaacacattgagtccattagatctggctgtggagaaaaagtagccattgttctagttgctgggtgtgcaagcatctccaagaggaaatagatgcttgtgaatgctgaataaagtatggaggacatgtgcctctattcactgcctgtggtcatagtttgttaatttggaagggcctaatttggtccccatggtgtctaacctcactaagttctattataggagaacatttgatttttcagatcaatattctgagattaaatgtcatagcaggacaatggtcaagatgatccctggtcacattgcgatgggattggggttgtggcttggtagggtgcttgcctagtatgcattgtaacatcacaaatcgatgcaatttggggtgattcatgtgatggagatgatataaagagagttatatatacatcagcaggtgacagaatccgctagaaatgactgggacaaacaactcaaagagaatatcttgaactctgcccaaatagaatgaagagccttgggctaggctcatgcttaccatgtgaaaatttcagttgagaagataagatttgggggatggtaaaggcacttgtcacccagtctgatagcctgagttctatctctggaacccacagagtagaagaagagaaacaacgcctacactttgtcctctgacccaccccccgccccccctgccccagacagcctttctctgtctctgtctctgtctctcacacactaaataaataaataaataaataaatgtaaaacatgtaaggaaaatattttaatacccttggtaacatattcatcatctttcaaaaaaattgtgcaaacttgaactttagctggtacatgagaaaactagaagcagcattttcatgttttacattaggaaggagagtagtgtgtactgagtaacaagaaacagccatcagaatagtgagcagtggctgaacgctgactagacactctgtatctactgatgcattagttcagcagcattataggaaagtattgttattcatagtattagttctaaaatgaataaagacacaaagtttctaaagatacatagccatcaaatacttgatagatactatgcctttgaatcctgtgctcttaatgtctattattttgttttatttttgttgttgttatttgcttattgttgttgttgtaatgaatccaagagaatggtattgagttgttttgaatttgcaatgccagctctgacctatatatgcacagaatatatgactatctcattttagagattcgaatttaaaaggctttgcacgttcagggccagaagggagaacctttgactgccaggccaaggttatcttgttgttgtctttgtgttggctaggtttttgtcaacgtggacataagctagactcatctgtcaatagggaacttcagcaaagtaaatgcctctgtaagacgagcctgcaaggtagcctgcctgtgaggcgtttccttcatcagtgatggatggtgaagagccaggctcattatgggcagtgctatccctgggaaagtgatcctgtttgtggggaggcagtggggagctagtaggcagcattcttccatggctcctacttcagtccctgctgcaagattcctgctttgagttcctaccctgaattcctttgatgatggagtgacctgagagttggcaatggaagctggccttcattgtccacggcgattagttagttccagagccttgggttagtaaaccccttacataaaataatgcagtatttgcctatgacccattatgattgtctctatactttcacttctttcagttctagaagcagggtttcactgtttaactgagcctggcctgggactctctacactgtgcatcctaatctggattcaaactgccaacaatcttctgcctcagccctttgagtactaggattatagatggaagccaacatgttcaggttcccaaatactttaactcatgtctatcaggtttgtagtgcttaattcagtagaaatgctatggaagtagttatggtatgatatccatttgggaatagtgacaagatttaaaataacaaaaacaaaaaacaaaaaaacagtgttcagtccatataatttttttcaaatattttcaacccctgggcggaaggacgagcagacgcatacactgtggggtgaagggatagctgtagaaatacatgctgggggctggtgagatggctcagtggttaagagcatcaactgctcttccaaaggtcccgagttcagatcccagcaaccacatgtggctcacaaccatctgtaacaaaaatctgatgccctcttctggagtgtctgaagacagctacagtgtacacacatataataaataaataagtcttaaaaaaaatacacgctgggtgtcgtgttcttcctcttgcccaggagcatagccagtaccaagcagacatccacaaatgccagtggataaaagagcttagattagatggagatctgtggtcgaccacaatacctctgcctctcttttctttataaatagagtaaaccatattggacgcctacaaaagtatttgtgtccatatttaaaatggacacaaagtcccaactcttcttcctcattcggatgcctgcttctgtcttctcccatacattcccgggatgcacgagaccaagtcccctgcatgcacgacattgggaattttctgtggcacctctatttgatgcctcatttttttaatgtcctgatagaaagataaacgcagggagtcatgtgtgatggtgtctcaggaaagagcagaagtgaaattaggaagtggggtttgtttttgttttttattttgttgttttgtttttgtctttctgtcttgttctgtgcttggggaccattactatatgtgtcctcctctttgagaacttgggcgtgtttggaatgtacgcaacatcatgtgccatcagatggccaaagctagtctctctaggatctgaagcatcattgttcttgctcttcactggggctttgtggcacaatagaaaaagaccaggacaagaagtcacaagccaggtcccaacatcaatcacatacttaacctctggcggctctgagtctctgcccaccagagcaacttcatctgggaaaggaggacgcgatccagatggctgattggattctgtataatggtccctctggatgaagcaggaagttactcacagggaggtcatttaggggctctatgactcagcctcggggacaggaggaagacaaggctccctaaagtcctggtggagaatcagagccattaggctgggcttcctctcaagtcgttatttctacaccatcctgacagcctgccgcctactccacatgccagcccacaatgcttcacaagtgctggctggagaggaagtccagtggagccgaggcctcgtcctcagccatgcacaggatgtgtgaatctagtggactaattggagccagggtctgggaggcccctgctcattaaggatttatagagcaccttgtcatattcagggcccaaagacaatagttattagccacttttgtttgctctccatggataaatgtttcccttcttggttttatacatgagggcacttgggaccagaatgagacagtagaggacctgtgaccctaggaagcctaggtcaaaggctgagagcccttatctgggaccattggggttccaatgatggtagcaaacactggtttagtaaaaccccttcctgatggttcctctaagccatctttagaaacctcttaactcgtacaattaccacaatccttattatcagagacagggacttgatagtatctgaggctgatcctcttgcctcagccttctgagtgatgggctcacaagcaagagccaccatgctaggttaacgcttttatttcctacgcaagctccagtcataactaaggctattgttatatccccacgtccattcataactaagactattgtcgtctcttagtctctgactgaggctgctgagtgttgaggcaggtgctctgtagagcctggatgaaggtagatctacaagaaaggaggacacatgtattattcgtattattattatatttatagtgtgaaagcaaagcagagtgatcatgtctgggagaacaagcctggctggaagcccctttctcacagccgccgcctggttgctcctttgtgagaaagcactccacttgtaaagttaaccacgcatcagtgagtgagagctgttctcgctaattggcggggtcccgggaacgcagcataattagcagctggagtaatggaccaggtgccttggacttctatttctggttccttcggaaaccagttgtgtggcccgaggcagtttcccctcacttcttgtgtgccttgtttcttttccttcaccctcaagaaaatttgcagtttttcttcacaaagggcagggagggggctgctcagtgagcaaggaaacaaaagtgtctgtggggatttgtggagatgcatagccaaaatgccctgatttaacaggtattgatcagtagaaactctgattattgataggaccacatagttgagtttataattagattgttgggcatagaagtagctgaagtctttagggagctagcccagtcattgccacgactgtctggtgtgtctttatgacacatcccaaatcatagtgccagggatgggttgtcgtctctgcaaaccagggcatgggggctcctcctgagcagcccccagggatggtgcagtaccagcagagtgagagctcatcccccgatatttacaggaaaacaggaaactggacatctcccctttgcctctctccatattgtcggtttttattggtctgtttggttgcttttgttttgttttgttttggatttttggttttggttggttggttcgttttgcaatgccagccttaaaactgagtgtccagcagccaggggctttaacgtcatatgaacaaaaatgccccagacccccatgaagagcagagtgcctttagcttaaatgacatccagcctttcctgccagcagcagctgtctctgccctctccaccccttcagccttctagttcctgcttcccccaacctcgagcagctggatgggtccctagctccacccctctcctaagtgagaaaaaaaaaaaaatcagtagccagtgttgttgcctgcctgcctatcctcatccagttctgcaggacacttccgatgtccccaagaagattagaaggttttctaatctagaaaaactgtctactcccagctttccttctcagtatttactttgcaaaataaaaaccaaaataaagttgtgctaaaacagctatcagggactctattgctttgtcccagctacgaaattttctacagaaaatgcattaccctgtggacacaccctgagagccatgactccagtgttcacccttcagagcagcactgaagtggaagccccacccctttccctggacagccaccctggctaaagatgaggggctgcagcacgcccagatggttctatttgggcctttggcagacacacggatctccacactacacagcagcagggaccacttagaggaaaggcatggtttgtggtttggattttttcaaggagctggggaaggaggagttgccaggaaaccaaccctcagagggttgtgctccagggttctttatcgggcctggaggcactcctgaaaaaaatacacaagtggggctttctcctgagtgtttgtgtcaggtgtaacttccttgcctcccagggaggggtctactttctctgatctgtacatcagatacagatggggtccttaactcccaacccctactccatgctaccaagaccaggaccagatatatcacttgtagggcccatgccaaatagatcaaaacacattggaaatttcaagatggcagcagcaagcgaatgaccctcttgagcaaggggcacttgagtcacacatccataaagccagtcctgtacagggtccacgttgctttgttagagttggtacagggtagggtctaagaaggacatatctttctttggggagaagtggtaaataatcctttatacttgctgtaagatatctagcacacacataatctaatttaattctttaagctccaagttaagacgtgggagattttagagaagaactctggtggttgtgcagtcaccctctctcttttgccaggatctagaagctctagagatccatgacagtgagatccatgtctgttgattacttatttctattcccttgcccagcctgagcccaggacctgctgtggttaagatccatctagagccgaattactacaacttacttagctagtgacgtggaaggaagggagcctggatttaaacagaagcttctgaccgtaaaaactctgtgtcttgccatagcatgctacggtatggcaagttatgcacgaagccaaggtcatagagtccagtggttctgctgcctgtatggctgtggtgaagtctagttgcggtatctatacccaagacgaaggtagcagactcaaagtatctacactcagggattcatggtggcagagcacccactggctgagacatagttctgtgtgtttaagtgaccaaaaaatccttctcagacaggatggaccaggagccatctgagccagcacaagattttagagcatttgctttctttccaatgtccctccacccacttgcgactgatctccagagagacaggaaagtctctagtctctggcttcagagtagaaggcagtgtggatgaagaggtagctcctgagtcagagccactcatcaccccttgcccttcccattacccatgcagacgggatcatttagaattccatagaggagagtgtgaacgtgaaagaatgcagcctctctcgaaaccagttttagttgctgctcagttttacttgggtggtaaacatcctgggcctggagaaaacggggctcacggaatactgggaaataatggtctttgcgtgggaaaggtgggtgctggaatagagctgggacctcagtctggagcaaaacctaaaaagctgtgctaagcctccacatagtagacagagggggttacaagcaaaatcagccattctcacaggaaaaacaagaaccctgctttactctggagcaaagcaaactcacatgctaagcatataaaaggaaatggaagccgcgtgaataaaataaatgcaaactccggtacacagagctttagcccctggtgacggtccccagaccgctaagtaactttcactttcatccagaaaaagccacccgcttccttgctcctaggaagcggctctaattgcctcccgactcctcaagatcagcttctttgactcctggggttcccttgtcctgactctgtgtccccacaggacagaactcttgcccccacccactccgctccgcccaccacgcctttgtgctgagaaaggaaaaaaaaaagaattacaaacacgcactgtgatcatgactcgcctgcccccaactatggtcgcacagcctccgccctccagcgagtgaggatgtctgaggctcttacacattaacggcaggaagtggagtaccgaagggaggctgggaatttgaacgccttcccatttcagcactcgaggggaggaagcgctgctcagccctccgcgtgcacagatggctaccgctccctcctgagcactgtgttcccggctgcgatcctcctcctctccctcctctcagctccccgcccccacctcctctccctctccttggagggaaaagtctgcagagctgagaactgtcttggagaattcaacaaaggctcgagccaaaggggagcaaactttaaagagaacttgttttgtgtctgttaaggaacctgctgaaaaaatccacacctattggtgtgtgtgtttcgagcactagtagtaggcgggctaccgggaggaagcacggacaactgtacggtctctgccttgataaggaaactctcagctgttgaaaggttaatcagagaagaagggacagcgtgaccagggaacttactactcctgaatttaaactacgttgttttccatccagatatttcaatggagacagttggagaatctgtatttcagggaaaagaagttttccgtggaagttcatgaccctcgcaggtaagcacaaggagcccttttctttggggaatgcatggcatgccatttgtacattgattttgtgttgtgatggtttatgtccatgaccaggacagagttcacatcagactgtaaaactttgtggtgataaatgcaaagtgtgtgtgtgtgtgtgtgtgtgtgtgtgtgtgtgtgtgtgtgtgttttagcaattctcacctgtctctctctctctctgtctttctctctctgtctctctctgtgtctctctctgtctctctgtctctctctgtctctgtctctctctctgtctctgtctgtctctgtctgtctgtctgtctgtctctctctctctctctctctctctgtgtgtgtgtgatgctggaggaataattgtggcactttggagccacatttgagtcacatggggacatttcctcttaacagacaggagaccaaaggcttccttgccggagctgctaagcctacttcaggcaggacggtagagactgaaaggcatctgtcaaccaaagtggttaggctcatttattctggttctgggtgcttatggttttctttttaatgttagttttatgggtgggtatgaaataaatgcagttctttttccttcttcctatattgcaccagtcattggactcgagaacaccagtcttaaaaacctaaaaacctgttccaagttggatgctgaacaataaatagggttctaggttgggctgcagagagccctgcagggaaggagcctgggcaccaccaactttaagcttttcctctttgtgtgctggcaattctatagtcgaaggcagcccactgccagcaacagggttccctaagaataaattgctgtgtgcaggtccagatgcagactgacaagaaagtaggccccagacgatactaaatagattatgtgcacttgagaagccagaatgggttcaggtcctggtgacccccagccctgagcttaggaggaagtgctagcagcgaccctaccttgcttctgaacagacagacaagcagcggtgccctccaggcagctggggacttgggatgagacattgcctacaaggagagggctgaggtttgtgcagaagccctcgtgcctgctgctgctgctgctgctgctgataacccagctgggttgtgtacctccttgtaatctacacagaacagcctcctactgtaggcgagagtttatccctgccccacagttaccatgagactagcaactagagaacagaacgttctagaagccaagcctctgcagtcaggtgcagaggataatgttaagcagaaggatagctcattcagtggttctcaggaccatgggatgcatttcatggtctaaagacctcctccgcagaacacaatccgtatgcacaggccacggaggggcaagcggatgccaaaaataataatccagctgaggagaaactcgctgctatttttccaggtgaacttatgtcagagtaacatggacattcatggacagatgagagggaaagaagtccaagtgtaagaagggtaaatcgaattctacaccatgatcatatacagagaaggggatgcctggcagagcaaacattaaaaaaagaagaaaaaggaccacctgtgggcctgagtgcagggaatagacagagggaaagaatttaccccagtgtgtgtgtgtgtgtgtgtgtgtgtgtgtgtggtatgtgtggtatgtgtgtagtgtgtatctgtatgtgtgtgtagtgtgtgtgtgtatagtgtgtctttgtgtctgtgtctatgttatatacacacacgtgtgttccttctgtgtctatgatctcatcagtgatataattactaaattcttttccctttgccaaggtctaggaatataggaaagacacctaacatcataccttagcatagagtgggcttttggcttatttagccaaagggatctatctcatacatgtttggagaatttgcattttcttctatggtagatatggaaggctgaatcagtgttctcttccatcaggaactgttagcagagttggggacaccagcgaaagaaatcattgatggagtttgccaagtgtagggactggtttgaaacttgcacatatgtgctccccagatagttccttactatgacccaggaaataaatcaaggcacagacatgaattgtgggtagctagtatacggtacaggctagatttgaaccctagaagtctgaggctagagcccatgaacagtgtactgagtgtcaagtgatacagaccaaagtgctgaataatgtgggcaccaaaggcctccctggtcatgtggccttcctgaggaggagagatctgagctggaacccatggggttactaggatcaaagccggggtggggggtgggggtaggccctcaggcgatatggacaactgaagaaatgagtgttttatgtggacagaaaagcccaaagatggcagcctgggctcagagtatgaccatttaccttgaggaaaggcagccctgaatccaccatgacagggacatcacctggggccaaaataactttctgagtggaatggggcagatctaaccagcacctctccctgttgtgcctgcccagtagaacacaggttctgtggtggactttagcccctccccattgtctcagttctcaactacctttgtctctgtcttcccctgggttcagcaaacactgctccattgctgaggtttaggtaaagcagacgttgaggtgggaagggctgacaggagagatgagcagaggagataaggtcctaatggagcaggtgaaaagctgagtatgtgatgtagatccccgtgacactggcttcccagaccccgtgaaccacgtaagccttccttactctgttacctggagagttgtacacgggattttacagctcaagttcatttcaagttacttttctacatacttgagctttcctcggggtgggcggtgggggttcatttactcccagccatactgagttcagatggcagcttcttgactccccaaagatctatgggggaagcactccccctccctctctccctctccnnnnnnnnnnnnnnnnnnnnnnnnnnnnnnnnnnnnnnnnnnnnnnnnnnnnnnnnnnnnnnnnnnnnnnaagcactccccctccctctctccctctccctgtcccctccccctctctctcttcccccccttttcagtttctttccacagagctgttttactcattggtatttttttctcccttaactttgttttaaccagactgggagttggagagtgacccaacctgcctagtatccggtttctaatcaccagatttgaatttccccttaaatgtgggtatgaagaagccccactgtttaatctctagcttacagaatagtacagtaaaaccagcatgaaatttcaaaggaaattgaggggtggagaaaatgctgttattcataagtcccaatgagtctacagttcttccaaattagatattttcatctcaaaatcattgatatttcttctgacacatggatcaagagccccacttacaccccaaccagccagctcttcccgttttttgttgttgttgtttttgtttttgttttttttttttttttttttggtttttggtatccacaatggtttgtgagtgggagccacagcacacatgtgggggtcagaggtcctcatcttccaccttgtgtgagacagggtcttgtgttttttgctattcacacagaccaggctaggtggcacaaaagctttcagggattactgtccggtccctgcttcctgtctcatcgtaagcacactgggatcacagatgtatacagagtccaacttaatgagttctctggagagccaagttcaagtccacatactttgtaggttaagtgctttgtgcactgagccatcttctcagtctcactttactcactcactctctctctctctctcttttctctctctctctcactttctcttctctctcctctctctctcctccctcccccaccacaaacactttaatttattctaagattttaaaatatttaaaaatatctaattacatttatttgtgtatatgtgcatatgcactgcctttgtcagcatgggtctatgcacgtgtgtgtgtgtacatgtgttcatatgcatatatgtctatgtagcagaagtcagaagacaacttgcaggagtcatttctctccttatatcccgtggtcccaaaggatcaaactcaggttgtcaggtctggcagcaagtcatctctctgaccaactgtcagactctatcagtgcatcctatagaacgtatatcagactctatcagtgtatcctgtagaacgtatgtcagactcgatcagtgcatcctatagaacgtatatcagactctatcagtgcatcctatagaacgtatatcagactctatcagtgtatcctgtagaacgtatgtcagactcgatcagtgcatcctgtagaatgtatttcacaggtactgggcaacgctggtgcacacctttaatcccagcacttgcaaggcagaggcaggctggtctacagagtgaatttcaggacagccaaggagagatacacagagaacccctgtttcaaaagaacaaaatgaaaacataacaacaataaaaagagtatacttcagtgaggctgtggccctagaacccttttatcccccaccaaataccatgcatgttttgagactgatgcatcctgtttctattttttaactccacgtacctttctctactccatatatattccaattagaattatacgtgtatacagtttaggggagtggctggctcctctttctctgccttccctctcctgattcttaagtacctctatgttctgggatgaagcagtagtgagttaatctgctctaaattctttggcgggtgcgcacggtcctcgctacccaccctcatgttttggatttacgaatgaaagacatatatatgtagccttttattttaatatgtcttaaacagcacaatggctgggcacttccaaaccttcccgaggctaacacactctgatatcctgagttattacttactaaaacctatttgcagcccttgtgggccatgacttccaacccttacatcttggcagtgtctctgtgtcgctctctgttcttcactcctcaggccggaaccttctcctggagtggcccagccattgagttgcttagggcgtattaaataaaaatnnnnnnnnnnnnnnnnnnnnnnnnnnnnnnnnnnnnnnnnnnnnnnnnnnnnnnnnnnnnnnnnnnnnnnnnnnnnnnnnnnnnnnnnnnnnnnnnnnnnnnnnnnnnnnnnnnnnnnnnnnnnnnnnnnnnnnnnnnnnnnnnnnnnnnnnnnnnnnnnnnnnnnnnnnnnnnnnnnnnnnnnnnnnnnnnnnnnnnnnnnnnnnnnnnnnnnnnnnnnnnnnnnnnnnnnnnnnnnnnnnnnnnnnnnnnnnnnnnnnnnnacacacaccagggagtttagagcagattactactaccacttcactgggaatgtatctgtactggataagcagacctttcagggaacatctgtctacttagagtgatgcaggaagtctccccatgtaggaaatgctctggactgtggagaggaggaaagaattcacccatcttccccacaggcagcatcgcctggttaatgaagagcattaagagcactgtcaaactttttttcctgactctgaaatctgtcttggctccttgccaagaattgaagatcaaaaaggaccatcaggtgacctagagtgacccatcttgcccaggggctaaagcatgaggagtcagcttctagacacagcatggccacgtgaacccttcagtgtgtatgtacctgtgtccttgtgtttcagggtgaactcccctgtccccttctcgtaataggctctcacttaaagttgtttattgaatggtgtctccccaccaccacagggactgaatgaagcttgtactccttgcttttgcagggcttcagtgaccaggaggacttttgggcacagtggcattgccgtgcacacctggtatgcgtgtccggcattgatcaagtccatttgggcgatggctattagccagcatcagttctatctggacagaaagcagagtaaggtaagccaccagaccttctaccaggcggctaactgggcctcaaggcagcagtgtagggatggaattagatgggtagaggaggagggaggggctgtgtccttggcctgagacctatctgggtaaggccttgcctcttggggctgcaggtaggaagaacatcagaaaatctttaagaggccatgctgggtgctacctagcagggtacatacaactcagggtacaacccagccaccaccagaggtgcttaagcctcaggtacagacccagggaattctgaacatactttcggggcctctggagactctcttaataagttctcacacccttacctatatttaaacagtggtatattgttttctttggggtgagagtgcagataaccatccccaccacaccgacaggaataaccgctcagggaaattgctgtgaaaagccctccagcctttcccacctgccaactctgtttttaaaatgtaaagctggaaaagtgaaaaggaaaacaaaacagaagcaacaccagctctgactccctctggtagacctggagccaggggccttgggagcctgccatctctgcacccaggaggttcatccacccccagcctgaagggccagctgtgctctctggtgggtgggagaaccacacacttttggttcacatagggcttacaacaacacaccagccctctttctccacctggcttcccttccttcttttccagggaccccacaggccactcccactcaggggatctccgaaggggccctgatgtggagaaggctgtaagcctgcagtaggattctacaggcttcaggtcatgggaacaccgggcaagatcagccttggcccctctggtggctcccagcagccatagaagttgcctccccctgttcccaggggcaggtggcagttaatgcatcagggtgattggactggtggtaccctctgggctcttgttcctttgctgtggggtttctctttcctatggagagaaagcaggaattgaaagtaacataacttgcaactagtaaaaggaaactggcagaaatgcccccccccccccgcccggcccagttcacttccaaatcatggcctgtccccatcacagccaccatctgctttgtaaagaatttattgggttttttttagtctttctgacccctttatttagtcccttttggggtgaccaagtctgaaggtgtgtgtggtgttcttgtggctggaaatcatgagtgtatcctacactcgtctagtggcgacgggccttagcacaagcctgtgaagcttggttaggtcaaaagaaacagggccacgggggtttgactcatggtagatgttgagacagtgggtgggggttggtgccttgctctctggtagatagcattagaggtcaacacccacaaacatgggtgggttataacggttggaagatggaatgtttctcctgaattcccagtgtccgtgactcttaagggtagaatcctaccccaccctcaaattctaatgccatagtttgcaatggagacaggaagtagcctatgtcacccacaggatagtgtagtgtcagcggctggcttggtcctcttccccaggctggtggtttttgttttggggtttttttggttgttttttgtgtttgttttcagtttcctgagtgtctcaagtagtctattcttggggttctttacacacacacacaaatgcctatgagaagtctttagtagacttccagttagccacaatggatacagtaagcgaagcccaggaagaaatgatcaccaatccttttttaacaggaagcattattaagagacaaaccaagggctggagagatagctcagtggttaagaacactggcagctcttccagatcagggttcagttcccagcacctacatagcacttcataactccctctgactccagttccagggcgtctgacaatctcacacagatgtatatgcaggaaatagaagaatgcacataaaataaaaataaattatgagagagagagagagagagagagagagagagagagagagagagaaagagagagagagagcaagagagagacccaactataggaggtggcccaaacctgtaattctagctcttgagaggcaaagacagggagactgcttcttcagggcaagcctaatctatatagaaagttctagactagctaaggttacttacttagtgagactgcctaaaaaaaaaaaaagaccaaaggccaaaagcttgaggaagctctcagctgtccttttctgtttactctgaaggacaagtagccgaagtcccagaggaatagaattttaccaaggaatctttacatggccacaagagccttagctatgtatcaggcaagaaacatttgttttcttgtggttttaggaacctaagatgttattgctaagcaagttctctaccactgagctttgtttttagccctttgtgtcatttaggagtcaattctttagccttacagacaggtgaggaccaagcccctccgtttggacatcagatgactattttctagctccgtgacctgggtaggtgtcttaggacacggttttgctttctctaattagagaacagaaaaggaacttcctgacccagattagtagtcagtgaagtgacatgatgtttatgaaatttctttaggaaatagttttactttaagaaaattgtgttttattaacatcacgattaagctaacccattcccttgtctaatgctgcatggagtttaaactttctgagaagccccacattaaatcagagatggcgaaacactcggtaggaattacattgtgacatggttcatttctgagatgtcatgtggcccatctttggtgggcaccatggactgtgcgagtgagtgtcagcaggtctgggatgggaagcttcagatatttctggacagccagtgtgggctggcatcctggcaaggcttggcattctactgtatggggccatgccaaccattcctttctctgaagagctcccagcatagttcaggcctcccaagtgatgtttatcaaacccagagaaacaagtactgtctagtggtttgagtcagcgtgagcagtagccaagacagctcacgggtctcctccctgacatcagcttactcttcttcagagtcagtatgcaaatcactttgaaagcctcccctctctccctctgctctctctgcatttcttcctttcccttcccttcttcttcctcttcttcctttggctccccagacatgtacaagaagggaacattctactgtcaaaggcagagtggagggaagctggctctgtagacactaattataattgatcacgtatatctgctgatgttaaagatcagagatgctgtcaaaaggatcccgtgacctttgcatcctggaaccaaagagtgtcttatagactttaggggaaagtctttgaaagctcacattgttcagaggaactgatggatgcttttcctctgacctcagagcggtgcgctctgcggttaatgtgcagacatctttcctccttaatcttttatttttttaatcattcttcatccagtctgtcatttattccttctaaaataaatagcattatagaacaaattaaggcttcctcaccgaacatcagcacctaattgagtggtcagttaggatgtttagaggctctggggctggctcagagaccttgctatgcaagaagagaatctccagggagtgttaggtcattgtgataggcccattccagaaagttcttaaagttaccagaatctagattatattagaaaaaaacggtctgttgttgctgcttctgtattttggttttctgccagtgaggttgatatgtaagggggcagggtggacaggagagtggggaggtgggaagggagctagtctgaggatttccatatcattaatgggatccttaaaatgtcaagtaaagccatcaatctaacctcattcataaagttacatccagattccgatttatatcccattcctattgcaatggtcttgatagagagaatctggcatggccctcatcccagctctggtgtgagcttgaagatccccatggtataaacaggcatcggaggatcagagaggtgaaggatcagagtctaacagtgagtgaccaggaggagctcctgggcccttgccgctgtgcgacatgggtttggtgaggtgctgctctgtagttgttcaagtgtgagctgcttctgtgaaaacacagatcttagtaatgaacagtgctgaaagagaggaagtaatggattgtgctcgccctgctcgcctgaaggataaagcacaaccagatgggtgctgtagatatgtagagtgcacatgaaatagaaagcccttcctgcttcctgctacagccagaaggctgccaagcctggcagccggacttgtttatgaacaagggggccctaacctgaggaagttgaccagattctaaatgtaagaaagaggaggccaaagtcaaagcaccaatgtgggagaaggaggggcggaggaagacagttcacatcgggtgagcaactcgagagcaaaagtctaggggcttcttctgaccggaagtcactgtcttccatcaggatagacaacaacaggccagaggaagggcaaggcctgaagggcccagatagcctctgtgagacaaataacagcccccgagcaaaggaggaagcctgtaaatcaggaagaggggacagtggtgtgcaggcctcaccaaggctgtcagaatctgtatggagccttgtgggtatggaaagacctgctctcaggcagcaggtccccactgagcacctcagctccaccacagagagccagggtctgcttagattataatttgtagtggttttcatgatgtgtatgctatcataaagacattgatttctaaaacaacagcaacaaattacaaaatgttaaataatgtctatagaaaggaaatacaatgcattttcacattgcaaaagatgtcactaacgtagatggccttcctggaaaaaaaaatcacttttagagatgaaattgtaaactggaaacaaaatggtttgtgggctctgttcatcagctatgactattagcccagtagggttagttgacctgcatacaacatggaatggaatttgaattgcaatatgaagactttagaatcttcatagatttaatcaatgaaaattgaagcaaatctgtgacaaagcttttggcaggacctgagtattcaagagctttctgtcttgtgtatacggtctttacacatgtaggatgctagtatcctaccatcgaaactttccctgatcacatgggtaataactgaagatgctgaataacttctaaacttattattttatgaatttgtttcacatatttcatctgccattcataaagctaggaattcattttctcctccttgcttaagcacaaataagtatagtcacaactatttgtatgtatgtgcatgcgtgtgcgtgtgcgtgcgtgcgtgcgtgcgtgcgtgcgtgcgtgcgtgcgtgtgtgtgtgtgtgtgtgtgtgtgtgtgtgtgtgtgtgcatgttgctaggggttgagcctaggatcttgtacacactaacaaagtgctctaccatgacctatacctcttcattctactttttatgtttagaacaggtatctcactaagtcacccgaactggctttgaacttgttcattggcccagtcagattgtaaatttataatttccctgcctcagctcccccaagtaactaggattactggcctgacacaatttttcatttgttgctctgtcgagcagagaagaaaggggaggaaggggaaggaattagagggaggggagaggatgctgtgcacacagcttgtctccttggctccagtgcatcactctgtagtaggtggtaacttccctggcttatatttaggaacaataaggctcaatgagattaactgcctttcccaaagaccacactcttcccactatgctctatagcccgtgctctcatgggctgtgaattccagtttgtgtagcttacgagccacctggattcgggcttacaagtaggcaagtattttcttccataacctgttcacctcccctttccagtccaagatccatgcggcccgaagtctgagcgagatcgccattgacctgacggaaacagggaccctgaagacctcaaagctggccaacatggggagcaaggggaagatcatcagcgggagcagtgggagtctgctgtcctcaggtagggcctgcgcctgagacactgtccacagatggcttcctcccagggacgtggggacaccatgcacaggaggccactgcatatgctgtccagaagctggctttagtcgtcagaccaaagtgtgaagccaaacatgggtctaagaaatatttcccaaggggcagagggagatgtgtgtaacttcagtgaggcacaaattgtcagtgccctctaagggcactcactcatggggttttttcgaatgctggctgatgtaatcattaactatcatcctgagtgtcaactccaaaggcagagagtagggtttgcttgtgttcccttaagagggaggctatcctggtcaaggacattctgtttccaaggagacatctggggctttacagggtaaacgagtaaatgagacttgctgtcacaaaggaatggcccttgtcaccacctggttttactccctaattcttacaccttcccctaacacaaggttgttctctgcgacagtcctagctgtcctggaactcactttgaagaccaggatggcctccaactcatagagatccacccgtctctgcctccctagtgctgggctccaaggtgtgccccaccacacccagctctctaccatctgtgcgcatcaggcaggtcattctggcattaaagattaggaggtccagatcaaatttatcttggcttcaagagtggagatcaaggaagtggttcattggtagagcacttgcttagcgcactcaaggatctgagttcaacccccagcctccaaatcagtcagagtgggggatgctgctgtttgcttaaatgacatgacaggcctgggtttatatgaggtcagagggagaaagacagaatgttttgtgagccaaatgtgactagccgatgcctccttccaaagctgtttaaaccctgttgaatttaggtggctgttctagtctgatttctaaagtgttaaactgtgctaaaacattgtgaccaaaagcaatgaggagaaaaggagggtttgtttcctcttacacttccagttaaccattcaccactgagggaagtcagagtgagaagccaaggcaggaactgaaacagagacctcagaggaactcggcttactattctgttctccaggctggcattcaacgagctttcttatgcagcccagacccacctgcctaaggatggcagtacatctacagtagagggagccctccctcatcaatcgccagtcaagcccacaaagacatgatcccaggctgatctgatctgggcagtcctcagacacaggcagatgatcctgtgctgtgtcaagttgacagttaagctaacgaggatgggagccatgtcaccttgcccctctgagctaggaaatgaagaagccttaaactcctgtccttttccagggctagagctataaacagtgactgcaaacaactgtaacaacagaaaagggaaagataaaagaggaagatgagctaacccaagttagcttctgggctagtgttgcccactcaaaaagagctaaaggcaggagaatgcacactagcctggaatgagacgtgggtttgctatagagcagacagagtgtggatcaggtctccatgttggacaggctacaacccagtgatatgttcacatgcttgtgagctttataatatgacacgttgcacattgtttgttctaaagaaactgttaaaattagataggcttcaggttcacaagagctggatctgtctctgccagacctccaggacattgactctaactcttaattctgcacctgcctgaaattcttcaaagctgtttcatataaaagatgtgccaggtggccactgcttctgaggctcagaggtttgcaaggaagactgtaaaaatcctaagggtctatctggagttacagccccaccccccctcccggcctcccactgaatgggcaaagcagaactaaagggaacgctttgtcctttagacactgcatgcaatgagttccctagttcctgttaagcccagtctgaggaaaaagcctggagctatatcctacctgcctcctatctagttacagagagtccagccttgctccgcccggactcttccagctgagtgtcagaggatacaatatgatacagccttggcgctcatctcccaagatgctgtaaatcttcatgagcccaaaatcagtctttatttctaccaagttcccaggtcactctgctgctgctgctgctggcccagggactgtgttctggcggacgctcttcttgccaaaaagaggttaaagtgggcatgtggctcaagataataaaagccaggcttttccaatttgagcctataacctgatctatctttctggggcccccatacatctgaggcaagcaagctctaagggcaccaagacagatgcctatcagaagctgtagacgaagtccctaaggtgagactgacccctcctaaccactaggaataccatctgagcatctttgaagccagaatacaatccatttctattctgccatcagattggcattaatcctcaatccagtgggctaaaagagaagtcacaagaaaatcttcctgcctgatccatgcctacatgtaatgtttgagcatctttctctcaagatggtgacgtgactttcaaatgttatagtggggcccgggtgaggtgtttagaaagcaacaggagcctcgaggccacatgcaggttgtacctgtaagtagcttctatccactcagcccttctgagtttgctaagccagaacaactgtggaaggaagagaaagtcccatgaggagaccaaggaacttgtcaacctctaccaggccatacaagtttgagcctgaaaattgtctgtgaatgccagtagaggctctttgggaatgccccacgcccaccctcatgacttaggaaaacagcggggacaatggagggaggaaccagaacaggatgcctgccatcagtgaacaaagggaatttctagggtacatggtgtggtcttccctcccacagagcctgatgcctgctgccagttgtgagtgcttgctctgggaggaggcagcctccatctagggaaagccagccttcaccacaggaaagccattgatagcactgcctatgatggaccaggttcttgttcccagtatggagaaatttaagctgctggtctaaaactggggcagctgcctagttttcctcctctgtctttctgtccttttgcctgtaacatgttgtcacacgcttgctgtcacaggacagttctgtctttttattaacacttgcctggtcttccatgctaagaacattcactcatgaacaaggcaaccagcatccatttgcacaaactgtttttcctcactccctctttatcaagcggtttctagtaaatgcatcttagaagcatattgagaacctagccagcacaagctcattgtccagccaatggccactagtaaagttgttgataaattttgtagcatagcagtaaggcctgtgtcacctgttaagagtgtcctttctggggactgccaacacatcttccctcacaggtaaaatcaataccacactgatcgttaggaatggcatccaagcatctttaaactagacagtgcatctctatcctgctgtcaagttgaccttctttgtcacactggtgttagaccttctgaggtcacttgcattggcccctcaacccttgctgcttctattcatttcttctgacacatcccagtagtgcaacatcacgcataacggaactgcataacaatgctgttgtagttctataatgtaaacatttactttaactcctaagatatgttctgctttgattttgatcataactttggggaacaaccccctcgatcaccaccccccaggcattgccaaggagtcggtgctgccagggtttgttgatgctgcaccgtagaaccttgagtgctacgaaaactccttctgttgaatggatgtttctgaactcaattatgcagccaaaactggggagagggttagtgtacgccagcctttaaaacataagagtgcctctctgaaaagagtttgagtattgtctgttgatgcaaaatggagataaaatggttctaagctattagcagctttaaaggaagttgtttctatttatggctgtataactacctttaaagtcactaagaagtccagttattggtatctgaggcctctaatgccaaagaaatgaaggcgtgccagtgttgaacattccaaaaaccagaagcttatccacatggacgccctgagtcggacagaggtgggcactagcatttccaaatgaaaagggcatatggttccgcattgactaagcttgacctgcgtcaagacatttcacataggagctcccatgaggagactgacagagttatatcctaagtcagagtatgggcctatgttgggcaaaacctacctgtataagagttcaggaaatctgctaactgacctcccaaaagggagggaataagcagagacatttagtcacagtggtctggaagggcctggaaatttcctccccatttggagatagctttggccatggagatttggtcacataggctttaagtaacaaattgttaggatgctcagattcaatttgagagatcaagtgtaagtgcaagccatccagctgcgctgttttagagcgtgttccttctctccccgccagcccggcttctctttctacacgagctaggttacagcttactgggcagtacatttgcctatatccttcaatctaatccccagctccatcaaaaaagaaagaaaagcagaagatccaagtcatgtgcaggatcttcaaagggtttatttcttctctcccttcccccatgactcgaagggattgtggaggaggcgtaagaaaacacagacagccgtccttgtccttgtagctgaagacagttggcttccatagcttctctggaagtgagtctaagattcgggtcagtattgttttaaggatctgtcctcacgggacagtcaggatttcagggagagcttggggagctgtcagagatgtgattttgctctcaggctatttaaaacaaatggcacaaacccacttagaaaatacccagggttctgcagggccccgtggcttgctgtattagccacccaaaccaaccaaaccaattatgtgagtgggggggggggcgggaagagggagataaattataaatttatgatttggctatgtggttagtttgaaggcagctgagtcgtcttggctgtatggttaatttgatggcagccaagtctccttccatttgatcaagcagggacatgaagactatggtgatggatctgtggttttaaaaaagtaaagccacacccaaacctgcattcagccataattccatggctctgacacttttcattctaggaaaaacatattgtgttcaaccctgaccccagccttccctgggacgggtccaccttctttactcaacaattcctacattctcctcctctgaatgcaaccacttcctcccattgtgaggatgcttattaataactcgtgtaaaaatgatgatgccatatgtagcagaagatggcttagtcggccatcactagtaagagaggccccttggtattgcaaactttatatgcctcagtacaggggaatgccagggccaagaagtgggagtgggtgggtaggggagcagggcggggggagggtatagggaactttcaggatagcatttgaagtgtatataaagaaaatatctaataaaaaataatgacgatgccagctatctgacatctctccccatgagaggtgatgtagcgcctactggctgtgcactgggaactgtacccagcccacaccacacgaagcactgcataaatcgtgcagtgactctttttagtgatcttccttttgtgctcttctcttttttatcaccaggaagaagtctgtcttcttcctagatctctctctggccgttcagagttttctattggctgtgtggtgcctctccttttaggtccaagatgaactgcattccagaggccttaaatttggtcataacctcggctttgctgttgggcacaacctcccaggcattgccaaagaggttgtttatgctggactgtgaaactgggcaggctgcaaaggcgctgtctgcagaatggatgtttctggactcatctgagcaggtctggcctgagttgaaaaggagaggaaaatggaaggtggtctcttccacttctatttggtggagggcggaggtaacaaactcactcctatgggtgtccaagggtgatactaggatagatatatgtacctgtggaagagaactaagactgacactgtatagtctgagtaaacgactttggtggtaaggttttaacatcagaagagagatctccctgccctcttccagacacatcagtatttctacttagccaagctctgtgtcaacttcctcatctttgctgagagcacagaagaaagatcatggagatttgcatttcatctccaaacctccatattacaatagagcaagagccctgggacagcaggatcagctcccggggttcctgagccaaggaacagtgcgcctatgccttacccacaagtaatggtttcaattagataatctatcagatgctgttaatgtttaaacacagattgtctctctattcacctccttccctccttcttagcatggagtgccctcttcaagtgacatttgtgtatttcccttttggcaaaaagtgccacttaatctcccccaagagcaagccaccccgaagactcccagacacccccaaaagatgcttgcttttcaaagaacttccacttcactacttactgaactaatgattccatttgtaaagtctccaagcatgtgttgttcgtgttggaaatcacactgaacttgcagagatggcccctggagatggcacactgatcctgccatctgcaacgtggcattataccacagggtctctaggacgtctctgatgtaaggaattcatccttgagaacttctctgggaaataaatatctcgttgtcataaaggggagtctaacccctttctccatattcactcctgggtatctgccaagcctctccctcccagcttctacagatctgttgggacttggctgtcttcatttgcttgtcttaacttttcattttccccttagaggccaaacaggcagtcatttccttccctcgattttacagacaacagatttctttcttgctgggggtggagatgggggatattactatttgtgttatatttcccttccttccaaagaggaaagctccccttccaccttctggattgagggtgggagcagggggcctgctcatctgcatctgtctgtgaaaacagatgcacaggtctctgcgaatcctcagcaggatgcaaactcatatccggtgccgactggcttgggatctttggaatgactgcaacaaattctccattgcagctgagtgaggagagccttccatatggtcacagggagagggcttctgtttgctctgtggcccctccacatgtggtctcttcacatacagctgccaccagcccggtctaggttccccagctggaaaatggaaaatgggtcccaagtccacagtaatatctgtgatgccatctggtttcccctgaagatccccaaatgcccactgaaaatgactttctttgcctagccatgtttggataataatcatcttcctagggctgggaatgtagctcccttggtggaatccttacctggcgtacttaaagccccaaattcaatcccagcaccatataaacgactggtgctcatatttacctctttaatggcagaactcaataagtagaggcaggaaaatcagggtcaaggtcatatatatggaggtcaaggtcagcctgagctagagaccttgtctccaaaaatacacctataaccaactgtcttcttcaccatcagctcttcctccctccctccagtgacctcgttcagtagaagcctttgggttaggagtgtaatatgatcgtgaactctagcctagaatccaagtagagatctcactaactcaggaaaggttttctggagaactcagctgatggtaggttttcctggctgtcatcagagggaggctgaaccacctcaatgaagtgatcattcagaaaccaagccagtcccctagctggcccctgtgttgtggtgcttccgggcaacgattgtgccctccatcctcattgtttgcttgtctccgattcctccagtgggtggaactgagggctgagactatgtctcccccatattaccttgcacatggaagggactccaaaaacctctgttgtcgcaccaggagatctgaagaccgccactggcttcctgtcctttggccttctcttgagttttgagatcagcgtatgtggcatgtggtcctgccaggaaggaagatgcaagcagatgcaacccacagggtgttgttgccttgacaccagagtagtgagacagaatgttccccctctcaccgagtttccattcaaaggataagcaggccacacagaacagagcttgtgccccacctctgcctccctgtgccagccaccatgacctctgtggtaagagtagaggtaacgcttctctgaggactcaatgaattgtagcatgtaagaatccctgctgagttctattaaacaatcaaacaaacaaacaaaacccacttttccccctctgcccgcaagcttcctgaactgacagggccagccacaccagccaccactcctcattttcttgcctgtccactcagggctcttccttttttttcccaacatgaatcgttctgaaatggagatgccaacaccctaataaaagcgaggaaagatttctaagaacaatgactagtattcacatggcatttagcatgttctgagttatcttttagcatcgcccaaatgttatcctgcttcattctcccaatatttgtagagccctgttttcattgcccagttcacaggaaacagagacctaggaaagttctagaacctgccacctcccatcccagatccactcagaagctaagctgaaacatacacacagacccaataaccctagaccccagactgcaggctccagctttaggagggcgctataccagtttgtttcccagactatccttttctgtacatctgagtaccctctctagaaggatattcatgtattatcaattacctttcagaaatattcatctcacctgcttttcactggctcctacaccaacccgctattccttccatcccttcccgggcagcgcctggctactgttttttttccatgtatcaattttgaaatttcactcttccaggtacagtagagatgacacatctatcttcttatttcatcttacagacagctccagtttaagactatttagtattcaggatcaggaagagataaaccctttaggctcttgttggtaattagacatccatcccctcctccctgcccccacccctccacccctgcctgcctctgtcaggaggcagggttgggagagtgccattcctagaggtttgggtagtgaaggaaggaggtcatactgtctataacattcctttggtaaaacttgaagaaatgaaggctaatggctgagaaggaatggcctaagttggttgtttattgggtaatcagtgtttcaagttcggagacattttagaaggtggtcactttctaggtaggaccaggatggttctcaagaaggtgaaatgccagccaggcgaggtggcacacgcctttaatcccagcacttgggaggcagaggcaggcgggtttctgagttcgaggccagcctggtctacagagtgagttccaggacagcagagaaaccctgtcgggggtgggggggggattcacatataaccctgaggggtcttgcatgtgcaatatgtattggttcaaacaattgataacagactaattatagtgccagacttccccaaggccagatacagactatgaaattatgtttgtcagctgggtgtggtcatgcaggcctttaatcccagcacagaagtagaggcaagtgatcactgagagttcaaggccagcctggtctacagacaaacaaaccaacccagatggacagggtaaagtatcatgtatttgtgtcctgaacttatagtgggagaaattcccactgggctaagtttctaattctgtttctgctattgaagtggtcaatgcagagagcttctttaccttttgatttcagccagtgttgcttcctttctttaaccctttaagaaggcaagcatctcattcagggaccacctagaggtcattcgtgaggacgagcagcctcacagagaactatgggcctcttcttgggatgttctttgagaggctctcagtggacttgtcccgaggcacttggccatctcttctctgggtggccatgcatccttagctactggtcacagcccacaggcttagaacatgcaagctcttacatagagaagccatcagattgcttgcctcaaattaattgattacccttcaacacagaaggcagtgggatctcttttcaaatgcaacaggttccccccccccccccaagacagggttttgcttactcctggccatcctggaactccctctgaaaacctagctggccccaaactcagcttcacctgcctctccctcccacgtgttgggattaaaggcgttgcaccacaattggcaaaggtaccaggtttatgtggagctgccttgagcttgtgaaatgtgggatggagacccacagcccactaagtatcccaaccacactccccactctatctgaagtagcccctgaggcagatctgcagtcttggtgcttaggaaacatggtttgaaaatactgcctgttattgcttctttctgtagctggagctctggactgctcattcttctaaatcattgggtgacgttcttatctttgactgatacctcattaagaaagagcagttcatttcaatgatttctctgattctaccccactaaggtaaatcaaaccgtatgtgaaggattggcctagcccaggcacagtgctaagtattttatatgccttatctcattcgttctttactaccgagataggagagcaaatgccttgctcaagaaccacccatctaatgaatggcttagactttatcaaatccagatgtttctcatctaccaggctgtccagttaccattaaaatgtgggtatcctggttcagttacttacttgcaggagtatatcctagttccaggctctgtattcttcgtgaaggaatttccagactcccagtgtgcagtggagccagctagcatttggggtgccagctatacacaggcagactcaggagctatcaggcctgccaaggctctctatcccattgaatgtgggttgatgtttaagttaattattagaaataataatttaggtagccataatgagccccactactcaaggccaaatctttactaatcctataagagcagaccaatcatccacaaattgtatgcttgcttcctaaaatttaatgttgtggtgagttttgctgttcccaactatctagggctcttagatttgactcaataaatcaccctttcctattgagaggtcaggcaggggtgaagggaatacaatgaatttttcactcatgctagaaattccttaatcttttttaactcaagttttccccaggcctgtttttaaagtctgacttccttccagtattattttacatccttattaattttttagatgacagagcagagaatgcctcattaaattttcctatcttcaaaagggattggaggtgggtactaagagacccaattaagagtcataatgattttttcaggttccattagatggacatagcccagagaggtttagagccgataagcacatggtagtgaacttagggatgtgaaaaacgttaaccaacagcaaacaagggtgcctgcaataagatccagtggtgtgatacccgagaaaggcacatctggactgagtctataaggaccatgaggtaatggagtctcagcaaggatcaagcgtttgctgagtttgctattgaatttggacacctgcaactaaagcatgtcagaaactcaggaaagagttatagcatggtccaaagcttggcaggtagcttccataacggaatgatatacaagcagtacactattactccttttttttccactaagatgagatacaatttaattatagcacccaagtatacaactgacaatatttatttgttcctgggaaagcataaagatggtttgttcttacagtgacagatgtcttcaatttcaagctcaaatgggccagaaaagggagagaatgtagcctaagtcatagtcaaattgtacgtagacactgagaattcttcattactaggatctcagggatctgggagaatggaaatcaagggaatatgggcttcctgaccagagaccttgaagaataggatggtatgcttagaggtctgctttgagtctagcagagctgttcaatgcaaagacacagaagtcggcattctgagacatctcctttacaattgagatagcctccaatccattgcctggtcctggaaccatccaaacattcagttgtctcttaaggaaatacagtccccggcccgcaccccaccaccactacaaagacctttggggatttttattaggattgctttttcttatattgtttaattcatggcaaattggcatctttaaaacaataacatctggatccaggtctacagtagtcgcctctgtttatttatatctctagttgtttccagcaaggagttacacttttcgtagtaggatgctcatctttacctacactaacctaagtccctgaaatggcttctggtaggccaggctggttttgaacttgcattcctcctgccttggcatttgagaaaccaaagttacagacatagatccagctctctagggatgcgagagttggtggtggtgaagtctgagccccctggatgcatactcggtgctatctgttgatttctaacggttcagctagtatgaatgagagaaggaatgcagccattagcctggctacatctagggaagccatcaatacactctataacccatcaatgtagaaagagctaccaagctcagtataagaaacctgctccaggagccagacactgcaacctagaaattaatcttttggtttaagctaaattcctccagttggtatcttcaacagttgcctcctatctagaagcctgctgtttgaatcatgcagacgtgctagccaggaaagcaaggaatgtacatttacgtctcttgaaaactaactatgcatcactctatattgtattctttccattaggagaaacgttttctcagcatatagcactcagataaaatagaacaaaattctagttggtatgtgtgttcatgtgtattattatattacctgtgatatgtaattattattatacctgtctatattttcatatatttttcaaagaacagatattatatatgcaataagcaaaaaccagcatatttcagtagacaagagaaaatttaagtcatgattgaaattactaatattaacttaaactttattctccccctccctttgtaaagcatataaaaattggctggtgtgacatgtcttaagacaatcagaaatgacagtgttcttgttcaggagagtccactcccctgaccgtccttcatgaagctataccatttccacatggtatttgaaaattcactcctcacgcttggaacactgcacacctgtctcatttcacgctccttgattcccggggtaaatcccatatccgagttgcgagctctggtggatttcattagtggtccagatgtgtgtcccttgtcagccgcctagtaaccccgctgtttatcaacaggttctcaggaatcagatagctcgcagtcggccaagaaagacatgttggctgccttgaaatccaggcaggaagctctggaggagacgctgcgccagaggctggaggaactgaagagattgtgtctccgggaagctgtaagcaattaagtctgtgttgtttgtcatacatcttcactatgaacagaagacagggtggagacaataggactgactttcaggaaaacatgtactgtccctccccagtgctggaaacgcccaccctctgtgatatcctttgttagaaactaggtattgaggaaacaccataccagttaaaaccctctctactgaatcttacatgacacatacaccctgaagctaaatgacgagtccctctaacagtccccaaaccatgcatgcatggcacaccacacaggacatgtcctcacaggacactacctcattctatataatgtcctaccacatcttgctttccagaagtttctgcctgctcattgctgggaaagcttttgcttcttctgagtttgtcgttggtttgtcattgggtacaatgtagcatcactgcaggccaacaaagacaccagggtggcacctgaaatacacagtaatccattaaacctgcaggtccactgtttctttagatctttcttttcgaaatggaatctttgcctagtttgtggtggctgctgctgctgctgctgctgttggtttgtcagtttgttgttgttgttgttgttgttgttgttgttgttgttgttggttttgtttctgcacctttggggattgaacctatggcctcacgtatgccaggctagcgttcttccaccgagctatatacccagcatagtaattcttgtaagcttgatgtaaaacaatgttgcattgggctggaaagatggctcactttgccagtgtgaggactagaagtgaatcccaagactctagataaaagcctagcagagtagaacacgcctaccatctctttgaggagatgggagggagggagcagctagtctagcatactcagagacaagcaacaaaagggaccttgtctcaaacaaggcagaagatgaaagccgatacccaagggttgtcctgtgccctccacgtaccaccacaagtatactccacccccacccccccacacacacacaccactcccacagacaacgtcttcttcagcctgtttcagtgctagtcccaatagcaatatatatggtgagactccctcaatccactttgacatttattaaaatgtccattcttcccttgtagacttcatttcttagtgtaacacatacagtcatgtgcatgtgtgtgttgtgtgtgcaaacacacatgtgcgtgtgcttcacatgaccaccatgttgctctcctgggagtggttgtactccacagaccctgacccaaagctccgtgggtaaacagttccggatgggaagtgtggagagtgcccctaactaaatccaggaggagcaccccctcccccacacaataatgctttgcagcaggaagagcgaaccagtgggcctgagagtgagatcacattacatttcaacttggcttaattatgtctggattgatttaaaccggagcttgctcaaggcagaaccacgttagcacaaatccattgcaaatcaggaaagccaggggcctgtctggggggaggggggtgtgctatgtgatactgtaaatattagcggcttttttttataaagactatgcttgaacaagagggggggaaaagtgggtccttggtgtctgcctctcataaatttgtaaagccttgttttgtgtttaataaaagaagtcactaaaccaagcaaagaccatacattacagcacgtaaggaacatgtcaaggcgaggctggcacgtaccataaaagtttcacaaaggcaatgtaaagaaaacaaaagctcccacttcctctgactttgagaacagaaaatataacttaggtagaaacaacccaaaagccagccccttgtccacgtgtgttaacgtccaccagagtctcctgacacatgtgcgataaagggatccagcagcctccgtgctaattcccggctcacagatcctccagactcaaggagcaagcaacactgtttgaccccttgggaggagagcagccactcgaggcagagtgggaaccatgggtgttccacagcgagagggcccactgccatgcattcaattacgtctccaccatggggctctggtgaaatcagatttgtagatggagaatcaagaccttgacttgacctgggtactttcaagccgtagccgcgttttaaaaatatagactgaaaccacaaacacttaggagttataaatccatggaagaggttaacagcctcttctgccacatctcagaaaggaagtcctgacagtgtgctgtttacacatatattaaaataacaatcttaacaggctgttgtttgtagaaggcctaaaagggaagcagataggaattcacagattaagcaagtgtctcagagacacttgtgaatcttttttaaagagagaatattccagaatagcaaacagtgggctatcctgctctaaaattctagaatgcttacataaggaataaaagaacacagaggagaagaggcccaggatgtggggaggagggtgcttgtgcacacacagaccacatagacacacacagacacacatacccatttagtctgcctgccacaacgagaagggctttcagcggtccttcctgttgacctgactttgcctgctatgggcactcagacctgggttgcccagcatgacagctgtctgttcgagcttcaagaggatacttctaagcttgtcctcgccacagacatccattgggccattgtgtagcatctgcactgatcgtgggtcagaaagccagaactggtgtctgcccaaatgggcctgccaaatgcacagagtggggtccccagcctctccggtgcctctctgcagtctcagagagacgtcttgcagtcttgcctggcttccatagtcttggtcagctgcagacttaaaccaggcctcattcagcctagtgtggtacactcgtgcaggcagggccttctaattctgagacattcctcagatgctctgtgctggcccagagtcactgtgcaatctgcactctgcttgttgtcatggtgcccttaacacttaggttcccagagccccagatgtacacacaccagaatttctgtgtgtgtgtgtgtgtgtgtgtgtgtgtgtgtgtgtacctcctctgttaatgtttagtttttactaaaactctcacacagaagttagtgtctttttttttttaagacaaagtttcactatgtagccatggctggccttgaactcgtggccttggtgaggcttgcaatagcacacctattggtctttgaggtcagccttctgctgttgaatgcagagctggagctaaatgatgatcagtctcttctaggcaatgcagttgcctggcatttgacatccagataacactccccataggaagactcatgtgggcaaagacatacaagcaagcgacgacaacaacaacaacaaacacttaagtttccaagtgggagtaacagatgcaagtgaaaagaatcagttgtgttgattgctgctcactgactgtgtggcatttcttcacacatagtaggctcacaggaaatgctcactagatcaacaaatgaatgaaaatggaccatagtgaagtccaagagaagttctatttgcttaaccaaaaaaaaaaaaaaaaaaaaaaaatgggtgggggaataaaactccaaagtgcatctgttctgtagctagggagtgttagcattcattttttttttttttttgtagaggttaaatttcataatgtgaactattcctcctaccctctgccccccaatactggggagtgaactcagggcttcatgcaggctgggcaagcgcactgcctctgaactctatctgcaaatcatttttagaggaggtcgttttatggaggtcttctgagatggcttcattagttagctcattagtggtcttaactttgtgatcctcccccgtcagcctcctgagtagctagctgggctgcagatctgtactgtcaagctatcccatgaagcctcatttaagcatagtgcttaatgctaatgggtcttaggtatgcattggacctctgcatcagtttgtgtgtcctagctaaaaggtaagcatgtcctctgagctacatgatatacaacctctctgaactgctcttttgcgcatgcaggaactcacaggaaaattgcctgtggaatatcccctggatccaggcgaggaaccacctattgttcggaggagaattggaacagccttcaagctggatgaacaaaaaatcctgcctaaaggagaggtatgctcctctctcactggagtctttcccgttgtcccacttgtattatccttgtttgtccttgttggggttggtagggtctctgtaatttcttcattgtttctaaattcccatattttcccttttaccgtgtttgggtcagctggctagttgctatctggttttccttgacaggctgagtttgcttgcctgagtgtacatagttgggtctctgttgaggttgtttatctaatactatagtctatttgcaggtggtcagttacggttagggagaacatcccactagcatgcaagtatccatcttagtagtggcctttgatactcctgatcttgcctgatatcacacagcctccatcggctttggaaaggcttacatggaagaagggaatttccagccacagttctcattggctggggaaggacaggaaggacctgccctctaccatcttaagtcacatggctactaacatcacagcatggacatgcagcctatgattgttctgccatggcctcagctgtctctatttggaaaagccatatttcaacatgatttttatcttctttggatggaatactggtgagggctgagactggagaattatattggaggataatcaaagctctgctgagcatagtggcgcacacctttaatcccagcactcggaaggcagaggtaggcagatctttgtgagtttcaggccatcctagtctacatagtgagttccaggacagccagaaatatacagtgagatactatgtcaaaaaaaaacaaaaacaaaaacaaaaaagatatacaaacaaaaagtatcctgcccttgtgcaagagaaacaaaagtccaggttaaccttcaggcctctaggtctccccaaatttcttctgactagagcgactcattcatgctgtggtacacagaagactcaagaacacttcaagacacagcctagcacgttagttattcttgttgctgaaacaaaatgtcctgacaaaagcagaagggggaggggtctcaggggagggttggtttactttagctcacagtttgaggatgcagttgccttggtgggcagagtgtggggccgcaggttcacactgcagggagagatgaatgctgtcactcagctcacttcctccatctcacagaatgacatcacccacacttccggaggtcttctcacttcaattaccttagtcttgaaaatctcttgaggacatttgacaattaagagtaaccaccaccaagggaaagaaaagcaaggaaggtatgtttagcctttagagaaagacattttccaaagtcaggtcagtgggaagatagagggcatgctgaggcccgtgcccgaggcccatgccttaggcctgcagtcacagacccctgcaaggctaccaggcacccagagcacttcatccaaagtgatacctaatcacgtcactgcctcttccatatgttcaagtttgactctgacttcgctgggttatcactaggaataaatgagctagacaatcatttccctggacacttacacatgcctgatgctcagcagacaaccgctggacgtagagatgtcagaagaggcttagagcactgtgtggtcaggtgtctgtcttccagagctggctccacttcacaacctaagctttgaaaagcatcccatgtttagtgagtgtcctttcatgcctggctcgggttcctgtggttgtagtgttttctacttttcaagaaagccaaccctagggctctgaggattccttgccggccccattgcatctttccgaacttcataacaggaagcagatagacttctgcagcacttcctcccaatggaaagagtctcactcttgttctgggctgccccagtgctcctggatgctggctttgctttcctggccatacgactatttctacagacaatccattcagtctcatccttgatactcctgatcttgcctgatatcacacagctcccatcggctttggaaagatagtcgttggactatcaagacttgttctagacgcctgtaaacctcagggtcaatgtcttggaccaaagctatcatacccacccgagaacagctgcttcagggagcccagattcacagactagtctttgtccccgactcacggctctgggcaggagtccatattgatatccttcttcctctgagcaagcaagtgcggccagcactggaaggatctggaaggattactgtctctaagtggcccttttcctcccactcctccttcctgctgcttctagacttgaagtgctcaaaagccaatgaaatcaggcagagtgtttgccttagtaggcctccctaccccactccaccccgagcttggcctgttgtgctgagaagcatattattggaccaccgtaatagcaagacatgtggaatccagcaaacacaacagtctctgcttccttagctttgtcattctctgccaaaccttaatgtaactgcaaatcacctagcacaagatatgtgttctctaatggctctgttgggtactgagaaaagagaagccactgtgtggttgttatacatttatgtagtgtgggctttatctcctatgagttcctagaacatgcccaggctgctagcccttgcactcacccaatcaatactcaaattctggaataataactgttgctgcttagagctagctgcaatgaaatggtttccctagttagtcagcttactttttcgttactatgacagaatacctggcaaatgcaacttaaaatagaaaaaggatttgttcggactcctgctctcagggactaggatttcactctggagcagagcctggaggcggggcctgtggtgagggagcagagcctggaggcggggcttgtggtgagggagcagagcctggaggcggggcctgtggtgagggagcagaaactagaggcggggcttgggggcgaggcatgttaaatcttggcatcggaacaggaacagggcttgagcaggaggctgagttatctacgctaacccttcccacctaacacattccaagccatctccttccagctaggactcacttcctaaaggttaccaaacttcccaaaacagtaccagcaactggtagccaaacgtgagggttagtttacatccaaagcatacaaaccagggaagagacaaatcaaagaaatgactgcttgatgcttaaggggattctgcattcaagtacaaatcctaacacacacacacacacacacacacatgctcttccatgtgagactcatcttggtaaaagggccaaaggaatcagtagagctaggagggagttacacaggaaggggaaagggagagtctgcagcctatccaaggagaagaggtgggggaactggttctaccacccacatcatccttgccccctagagggcctagaagggcctttatgaacatacaagtgtgaaaagaacagttagggcttgcagaaagagctgccaaaagacacataggtgtgtgggtgtgcatcctaacacgaggcacacaaagatgtaggacagagggggatatgtgggaggatcgggagatgtacatgtatgaacaactcccagaggacagtgacatgatccagagatcatgctccaagtagaaaaagaaaatgatagctactagcaacggttctgactttcctctaaggcttggtcttcatcagctcttttgtagagaaagaaagccccaaaagtctgtgggctgaggcctgggctagaggtgggcaaggtcgagtctccttgggcagcagcatcttcagaaggtgtaagcattggtcttccctcccacaggaagctgagctggaacgcctggaacgagagtttgcgattcagtcccagatcacagaggccgcccgccgtctagccagtgaccccaatgtcagcaaaaaactgaagaagcaaaggaagacctcttatttgaatgcactgaagaagctgcaggagattgaaaatgcaatcaacgagaaccgcatcaagtcagggaagaaacccacccagagggcttcacttgtcatcgatggtcagtgccacccacaagctcctgccccgctcccagacaaccaggtcctgttaggtcctcctctggatccttgcaggctctaagtagcctcttacccacacaccttatggtttaatccctggaaagggatgggtaatgatgggtgattcatcattaggacgttccatcctaaagatgaattgcaactggaggaacaaatgaaagggtccatacacagaaccccaatgtcacttatgacacctctctggggaacctagaatgagccaactctcttcttcgatgtcaccatgaactaaggaggttactgtgatagtccagctgagcctcaagatagcgaaggctctgcagttctcagagacctagcctcctttcctaagactggaaggcaaagtgcgtagccagtgtattggagttaagtccttcaggccaccattccgtacccagtctccttccctcgggctggttctactaccaagagcttcctatcccaagcactgtggcctgaaggattgggcggtacctcgtggattgtctggagtacgtgctcttatcccagctcagggcttcggtgatgatggaaaaccagaattcccgcaaatccaccccaagcatcaggtctctcccatggttaccatcttttctttttctccaagtcattgaattcttggtaatatatgttagaattatccggagggcatgaatattgagaataccaccttagttctaagacagaaactgatatagaggttttcaggctctttctgtgtctctgtgtctgtctgtctgtctctctgtctgtgtctgtctgtctgtctctgtctctgtgtgtgtgtgtgtctgtgtctgcctgtctgtttctttcttttttttttttcaagacagggtttctctgtgtagccctggctgtaactcagaaagctgctaactgattcgcctgcctctgcctcccaagtgctgggattaaaggcatgtgccaccacgcccggctgcctgtctgtttctgtgtgtgtgtgtgtgtgtgtgtgtgtgtgtgtgtgtgtgtgtgtgtttgtgtgtgtttcataatgggtgcaaggtttcagtctgggaaatgaaagccccgtccaaacagaggatgtgtggtgtggttgtataaccatgttgctgtacttaagtcccatgaacacttaaaagggatgaaaatgataaccgatgttatgtatattgtaaatatattgatacagatctgtcccctagaaatgtgggtatactaaagaaccagtggtgggctggagattacaagataccaaggcctgtctccttgcagttcacctatcaaacaatagggaaaagatgggttcacagttgggagggacagggctgaccatcaactgatggtcactctaggtcctttcactctaggatgtgcctgccgccattctgtgtcttactctgctgccctttgccccactttctagcagggctacagtgagtcggtccctcttcctcatcgcctcctttggggcctccttgaaggcatttgaacctccctgttctgtagaatcacctagaagcagcgtcagagctatgtctgggaagagcagcctggggcgggagggggggggggctgtctcaccaggtggcctcggggcgcccattcacaggcctgcccgagtgacggctattttcttgggtctgctggcaggcagcactggcttataaatcatcatttgtgccagtttcggctttcttccacgcaagcctccagccatttttgttaactgctcgagaatctgccttgccgccacagtgaagtaaagtcttcatcacagaggcctgtctgtgttaggagtgagcaagctccttagggcctcagaaaagcctgaactcagcatctgaaggacttggacctttgctaacatctcccaatgaacaggattgtttcagacaaacccatctttcctgggagtacctcagtttgcccagtgggagggaggatccttttactgtctctctctccagcatgttcctaattgaatggtgactataaaaataagcttcagagagatggagtctgtgtctagcaggcttgttttctctcctaatcacttaagttcattgggaaaccatttataaccatgtgggcaaaactgagttccctcccctggtttcggatctgttgaataacagctgctcccttctctggtttggctggtacttgccctgagtttgttctagaacaatggcgtggtttagctggatcctacctcctttctaggacagactaagccatagcatctggtgaccaagagcctaagaacacaaagacaagggaccattgcagagccagggcccactgcagagccagggtggggaggatggccctcctccaccagactgtcaagggaaacacccaacagcatctttatgtttcagggcttcttccttactgatgcaaaagagatgggagggtgtggccaggattggggggaaggtcacgattcctttcctacacattgggctgtgttcccaaaacacgttaaccctgtagactttcactttttatcttctagatggaaatatcgccagcgaagacagctctctctcggatgccctcgttctggaagatggtaggttttcccattctctgctcttgtacgtggaatccagattaaacccaggtcattccatatgctgcctgggaatggccttgtaggcaggaaagaggcaggctgggccggggactggatggattccttgtaggctcattttttcccctgagtcactgttgagcccacggtggtctacatttacactggttttccagggatggccagtctgcagcctttgtattctaatagcatagaaaataaacatgtatgctctgatagcccatgggtatggggttggacactcttgggatagatggcctagagaattattcttggcccacataagccaaaannnnnnnnnnnnnnnnnnnnnnnnnnnnnnnnnnnnnnnnnnnnnnnnnnnnnnnnnnnnnnnnnnnnnnnnnnnnnnnnnnnnnnnnnnnnnnnnnnnnnnnnnnnnnnnnnnnnnnnnnnnnnnnnnttgtctctgtaatactcaaagcacttttttggctggcatggtagctttaatcctgtaatctcagcacatgagagttagaaacagaggcaggatgatcaaaagttcaaggtaaccaaaactatattgcaagacccagtgtcaaaaccaaacaaggacctgggagtttatgtgagaacacttgcctagcgtatgcaaggccccaagttctactcttgggccaaaataaaacaaaacagaaaagaaaaaaaaaagaaaattttgaagtaaagagtctctctctctctctctctctctctctctcacatacacacacacacacacacacacacacacacacacacacacacatgcacacacacacacactgggaaagaggcagacatttatttgggttacacagcaaagtttgggccctactggaagggtctgagctataggaaggacttggtctatcctctgctcctgagacaagagtgagaatgtccctttagcaacacagacagtcttggaaactgttattgttttatttcctgttgaattctcaaacctggcaactgccaagggatattttcttggtcggtcttagaaaaggagttggaagcccctcccacccctacagaagcaggcggtcgagacttagacatttctgaagctctccctatggttgctaaaccaatacattggacaaggagaacactaattatatggaaatctattacctggtagttaattatttttgccctctaggaaaacctcaggcacccagtggtaagtggctattcagacagaaaacatgaaaggcctacccaagtcacagtaataatgataattgccgtaataataataattgctcttgatgtgggaaaacctagggaatagctacccagttgtcttgcccttgctattagaaatcagattgttgagtttgactgtctgctgcattaagtgggtggggaggccgtggtgttccatgagaacacagaggcctgtttggaatatgaggccctccctggcctagcattgatcaatgtcaccctggtctgccaaggaaggaacaagctagtggtgtccccttgtactaggagttcccagggttatatgtagtcattagctagttttgagacatcatgataacagttttgcccaacgtcctgggcctccgacctcctgagagctaggagtgcctcctccaatgtcctgtgttcctacttgcggttctcctctcacctcctagagactcctcctgtctgatttgaaggagtagcaggcatagaccagaacatatatatctgacctttgaattttggtgactgagaattaagctatgaaaatccgaaaagttgaaaatggatgtaggattccatgagtggttggtggtgaaatttccctctagccctcctccccctccctgtgaacactgggcatttcctctcttcccaaagccacctaccaccaaatctcttcattaaaccctcctcctgtctgttgttgattttcccagggtcaaaactgcaagaataacagttctaaaacaggattttcaccctggcacatctatgcttatgttaagaaagttttcttgtagctttcaggtcaaatctcaactccctgtctggaattcaaggtcccacactatctaggcacgctccgaatttctcctccctccccttgtctctctgccctctcctccgctgtgtagaagaacctgctactacacctagcccctcacctctagatttctactcagtttctgtccttctctgccccatagttcattgcttccagatagcgcctctggggcttggttgaggattgatgtttatgattggaccaggtcccaaggaactcagtatggtattaaacccactgtataacagaagttggccttgaactgccgatctgcctgactctgtctaccaagggctagaattacaggcaagagtcactgtgccttatgagacatctgccttctttggctaaatgggtttgcttcctttggaagccatccagcatacagatgtgcgaaattgcactccagagatggtggaggtagggtactattttgactgtgctgctgggtacttgggggataggggcagggcatattgcttgtgcactagctggactgggggagggaagcttagcctggtggaggtgagtgcagtgctggcaatgatcacattctggaagagaaccgtgaggtttatgggggtggggtggctacttatgcctctggggaggtagccagggtctctggggtgaggtctgtgtggcctgtaccagtgaccaggacaggggtgttagaagatgcttcatttatatactcaggtgttgggggagggggacttataaggtcaaacaaggagtgaaggctgataactgtcaggataataaattcttactagggttgttgtggccggagctggctttatggctccaggttgagactggggagatagccaacccctgctggcctacctttgaggtatccaggtttgaggctccctggacccttcttcctctgtaaccctgggccatcagggtcccaaaggactgggaccctcttcctctaaaacaccttgagccgagctgaggctatagctcagtggagagcctcacaagaggctctgggctccactccgacatcacagattaaatatgccaggatagattataggaaatttaagaagcttgtgagggaagcatggatggtagaaggcggatctgtcagcacttaatcatacctcacagatatacttccaattcaggtttttcctccaacaaatatttattgagtacctactgaatgccagctgtcattttaaccctgaggacacagggattaacagagcagataaaatcctcaagaaggttaactcccctccccccagagcaaaggagatctgtttagtgtctctccaaacatacgtcatggcatagctccatgatagagcactcgcttagcatgtctgaggccctgggctcatttcttagcaccaaatttaaaaaggaaaagttagaacgtaatacttcatttgcctgattaatatgaagcaatcacttgttggtgacaccaaatccaactcagactttattcgcacttaaccagacgtgacagcggtgcccttcacattcagttaagcctgcagtctgggctctgccttgacctggattgaccccagtgtgggagggtcacagagccctggcacatatgtgaagtgtagctccaaggcactgacatggtgtgtttgggcaaaggctccatctcttgtggaaataatgtctctgatgagttcttcctcctcctgtccatgcagaagactctcaggttaccagcacaatatcccccttacagtcgccacacaagggactccctcctcggccaccttcatcacacaacaggcctcctcccccacagtccctggagggactcaggcagctgcactatcaccgtaccgactatgacaagtcacccttaaagcccaaaatgtggagcgagtcatctttagatgagccttatgagaaggtgaagaaacgctcctcccacggccattccaggtgagctacattgggacacccaaatgaggtccccggatatgctcaaacagaatcaaaggcttgccccacattagaacctacaaatattgccaaaggatactcttttccttcctggaactcacagttcagctttgcgcacaaagccctctgctggcaaacccccagaagtacagatttgtcatctgaaggtagggaggggggaagaggggaggaaagggtttggctcatagtcaacctgttggcagatggatttaatgctgttacatttcacaggaattaattaggaaattgtagccagcagcattccagaatggcaaaggagagccggatctgaggatcctcagggtggtatagaaccctatacgatcttcccgcagagttctggagccaagcagctgaaatgcaagctgcacacattatcagctcattgcttggttaatatcaacgtcgtagagaggattatctggaagacatttaggcccgcttctgttttcctcatgttccttaattagctccagagggtaccctagcaggtactgtatcttgtaaaacaatgcttgttaaggatgaaggctccagagaatagtcaccctgtgcttaacttcgaggagtggagggggggaggtgggatagtgagagctggagtcccgggcaagctctccctgcaattagatctactgtcccaagctagtcagcccctaccaacgctgccacatggtattcgtgtgatcagcatggcttccctcttctcgcttgcagcagccacaagcgcttccccagcacaggaagctgtaccgaggcaggagtaagcagctccttgcagaacagccccatccgaagcctcccacattggaattcccagtctagcatgccatccaccccagacctgcgcgtccggagtccccactatgttcattccacaaggtgagtctgctgggcctttaggccacctgcctttctgggccagaccctggtgtagtaagacatcattggctccaatctagcccagttaacaggggagctaaggtccactttaccctggacactcaatatagtcaactctatccatatccagggacttgtggggccagagagccccagccttctgaagacaggtaacaaggatcctagtaggagtggaaacaggaaaactagcccagttaaggtgggagagtgcagcagccatagacaccccaggctaacctttgctctaccctccgttcctcatatatctttctcatgaggtctaaaatctattctggacccactttaatgcctcaaggtgtacatttatagtaaccaaaagaaatgaaccgaaaaatagacttccctgaatcatatcccttctctaagaggtaaagctgcatcacagaaggtcactggtgagggtgatgtagtacacttctgcctggatgtggccaagagtcgctaggaatttgcataagacctcctattgctgggttctatcaccttcctcttgttgatattgatggattggaggcaaagtcttggtactactggtagataagtgtatcgttcatgtttaggggttccatgtttcaccaaccctccattttagaatactcacaagaaacagccatttaggtacgttggctttcatttcagaggagtctttggttcaatcacgagaggacctctgttagaccttttggttgttagttttgtttttgtttttttgttttttattacctacaatcactattttaaaggggttagtgtaatgcttagaacataggaatttgcttctctatcaatagcatcattttcttaagaagcaaaagccctcagacattggtcaacacatttcatccactccctaggtgccacgtggattccagagattcttagctcccttcctcacctggtacctagggaagaacctggctttccaggggcaaccttgctgggctctcccattggtagaggccctgagcctggcctgtggcttttgtgggaccctttgatccaggactctaagaccaatcctgtctccccaacaggtcagtggacatcagccccacgagactgcacagccttgcactgcactttaggcatcgaagctccagcctggagtcccagggcaagctcctgggctcggagaacgacaccggaagccccgacttctacaccccgaggactcgtagcagcaatggctcagaccccatggacgactgctcgtcctgcaccagccactcgagctcagagcactactacccagcacagatgaacgccaactactcaacgctggctgaggactcgccgtccaaggcgcggcagcgacagcggcagaggcagcgggcagcaggcgccctgggctcagccagctctggcagcatgcccaacctggcggcccgcagcggggctgcaagcactggaggtggcgtgtacctgcacagccagagccagcccagctctcagtaccgcatcaaggagtacccactatatatcgagggcagtgccacacccgtggtggtacgcagcctggagagcgaccaggagggccactacagcgtcaaagcgcagtttaagacctccaactcttacacagctggcggcctgttcaaagagagctggcgcgggggtggcgacgagggggatgcaggccgccttacaccatctcggtctcagatcctgcggactccttcgttggggcgtgacggcgcccacgacaaaggctccggccgtgccgccgtgtctgatgagctgcgccagtggtaccagcgctccacagcctcgcataaggagcacagccgtctgtcacacaccagctccacctcctcggacagcggctctcagtacagcacctcttcccagagcaccttcgtggcgcacagcagggtcaccaggatgccccagatgtgcaaggccacgtcaggtgagaaggtggtgggaggcaggtgacctgggtaggctgaaggttgcctagacttcacagtcaagaaaaggagtcannnnnnnnnnnnnnnnnnnnnnnnnnnnnnnnnnnnnnnnnnnnnnnnnnnnnnnnnnnnnnnnnnnnnnnnnnnnnnnnnnnnnnnnnnnnnnnnnnnnnnnnnnnnnnnnnnnnnnnnnnnnnnnnnnnnnnnnnnnnnnnnnnnnnnnnnnnnnnnnnnnnnnnnnnnnnctctccctccctccctccctcccttaacactcttccttcgcgtagagtgagcatttcttttagcttttccagttaaggacagaaagccatgtgaagtcaggtcagagggtttatcctgccaagggtgcaagaaagattctagtaggttagagtcccaagttctaaccttgccaagaaaggttgggatgaaaggtcgggcttggatcttgaggccctgggaaaagaagtgtttgctctctgaacctgagagctgcatctgcttaggtaacctggctgctcctggcttttctgctgctactttcagggtctttgatgctgtgtcacactgaggtttgaacctagacgttctctatgaaatgataatgctcataactgatgttagttgagcatttacctttgctagatcagtggtggtcatctgtaactcataccactcagagagtaattaacaaaactacagccttctactgtaggtagaagaaacgagggagggtagaggaaaacaagaatgaaggcaaaagtgaaaaccagtgaaattttactaaaaagccaggctctggagacgagagcccctaagaagttcagcccaggagagcagctgctcattgggcctccatgtccctactgctctcttccctcgggcgcatgctgagcaagccccagagattagactacaaacaaaccggcagtcctgggcgtccctccttgaactccatggtcctacaacctttctcctgctctgcttttatccgtaaacttacccactggcatcccagcaggattcagagaatgaatacatctaacgtgtgccctctgaaggtcatgagcggctctagtcctctcagatccgatggttaagtaccaagggcaaaaagataggagtggttcattctctcagaattgccgtgtttgtgtgcatttgttttattaaatagcaggaaggtattactaagattttagtaaattgtaccccacccaccctgccaccaccaaaagtgcacacgaagcacctcagacagatgtactcggtgctaaattctcctggctccatctagtcacatttgcagtaacgctatggtacatataagctgttaaaagtgctgttcacttgcaggattactgaaggagcagatggtaaagtctggaggcccttccaacaatacagcatggtcctcacatagaagccacatctaaaacgccccagggcagccctctgtgctcaggtctctacaacagaaacatgagggcttcctattctatgcagttatagaaaccatcctgaggccagagtggagggacaaagttaagacaaaatacagttggggaaacaaaggtatttcccacggaatgccttggggtcaccaagaccctgtccttcatgtctgacattggtcacacctgccactgggtctgtcattgacttacgagctccatgctggtctgacctggcttctccctgcttttcccacactgactacatatagctgccttacctcaaagccagagaagctcaacaccgtccagtgaaattggagccaccccaccaagcagcccccaccacatcctgacctggcagactgggtgagttgtcctgtgaactcgttgacttagttcttctgggctcaaaatggagttagccaggaaggacatcagcagtactgagctcccagcaatgggaggatgtatcagcaaatggtgccaagaatcaaagcaatgcctgggctatcaccttctccccagctggcctactgtttttgatggggatgaattctgtgtgttctacttaaacgtaggtagtgattcctgggctgaaacaaagaagtggattcaattctgggcggcatttgatttttctgcaaaaatgtcaggggtaggagaaagaaccctgagtcagatattacacaggcttctcagtgtggttgctgtcttaatattggggtgcatccaaaaaaaagagggctcccgtcttggctaaacagttgttctgggtgcatcagcaaaggggaaactgtaccttgagacctttaggtagaggttgcccacagcaagatacggaaactggaagtgagctttaagtgtggacttagggccagttaggatgttccaatctgctgaagggtcaagcagacacaagtgttttattatcacatgctggcactttctacccagctcctctcttctcttgctgcttcttagatggtccattctgttaacacctgttggttactggaaatgggccccatatccagcttaatccccagctttggctttgctgagcgctggtgagcgtgtctgggaaaatctgacagctgcaggctgaattataagaccatcacagacccacagttggttccactgcctgtgtccaggctcccacgcttggcatccttagtcctccacatttatctgcagtgacttgacaccaggaaacttcatttttggtggagaagatggggagccaatgcttattgagtacttaaaacacaaaggctgacggcttctttgaacataagtgagtttcgtggaagcctgtctgctccccggcaagggaagtagctagatattttggattcataagtgagacagagaacacaagtcactcactccatacttttctgataagtcctaaaatgtgggccctagatcagcactttgggcttcacctgggatcttcttgggcctacccaaaactactaactcggaagctctggggtaggcccagtgggcgtccttaaatgaacccttgggtcattaggatccgtggttggacactcaccgaaccaccccacactgcttctttcctcttttcaaattaaggaaacatagtctgtacagtgtttctcatgtctacggctagggtagcttttgccagtagctgctacccctctcttttattataaaccactgccacttgtccataccagcgccagcctctaaatccagacagcttcttggcttagggtttgagaatctctcgggactaattcatacaagagccacacatctgtatacctctatagggtaaatggtatcgtccaaccaggacacttgggatcctctgtgggccatgcccagtttcatctgatctgaccatatgactgcgtcatttgactgatagacaggctctgaagtttacaagcagccctcccatgcctactcactcgagttacctccattaccgcatgtagccagtaaggctcacaaccaactggaaacagaaggttattgtccctgaagggcagcgttcttccagattgaggattactcaagaataataatgtgatagagaacaggacagtgggtaaaaattgccactgtctgccttcctaacagaactactgaggtcctgctgctcagagatggagcctgagtgttctgtatgattcttactgtgtcacagacacatgggtatatatatatagtcattgggttaagctactactaatcacgtgtgtccactctcctgtgtaacacaacctttcttctcttctccttccgctttcctttgttcagagaagcaacagaaaactctcccatcatggatgggtctgagtctccaacacaccaaagtactgatgaatagaggtattgtaagggaacgttttgttcttactgcccacgtgtgtgatccagatgtcctgcatatgtgctgcctctgcccatgtcatagtttccaggaggaaatgtctgaatagtgtggaagctattattcttatgttttctttctagctacatgtggcgctgtatgttcgaatgtgtgtttttacatcagatgtaggctagtccatgctccttcctggaagacaccccctaacccccaatatatttagactttctaggctttaagtacaaaaaaaacccttgcagtggttgggtattgtttaccagcttgggccacactctccgtgagcactgagccagtactgttctaaatagcccagtactctaactcattatcctaccacttttcagtgatatttgcatgcaacaccagatgtcatagagtcctgcttttcaaaatgtggcctgtaaattaccaccgccacctggagctcagaatgactcctggaagccacgctggctgctgagtgaactgcatgctgcaagctgcaaagtgctgctctcccaagtacaaaatagtgggacctgagagtctaagtaaccaactgcgtagtgctgacgctgagaagcacgtcagggaccactaaagtgacaggggaccatgcagaagtgggaaaagggccttagttagaaaacaacaacctaatcaggctctgagtaagaaagagacagccacaccaaagtgctgggcactccacaactcaaatgatcaaaacgctaaaagggttcagagaggagaaatgccctttagttctgacacacacctcgtgagcctggctttaaagaacggcagtgaagcagggaggcaagagggaaacacacaggtgtttccaccctggctctatggccactgacctacagcactatccacagccagttgactgggtaagtgaaaccccattctcagttcactgtggaatagggagaaaaggcatcactcactctttaaaagacgatccaacatacaattgattcgaatatgtcctatggcattaagcaagcatgtgttttgtgagtgtgaatagtggataccctgtccaggtgaaacaaagtaacagctctgaagggctgagtcctcaaactccccgttcctttcgtttcctcggagcacttcgcctctagaagcacctgatggtgggactccctatagtcaatgttgcaatcaggaaaatgtccctaggagacccacatcacaagtgaattggaaaacaagcttctctaagattctagcaagtcgtaccagtatttgggaagctgaggcaaagcaagggccagagcttgctaattgtttgtgtccacagtgaggaataaatcatcctcatgctgtcagagctccttggccagggccaagctcccatggagccagtgaccgtggctggagagctaactggcagcccttggtcacgtgttccctttgatcagagtaatagggaggcaggaacttttccgcaggagtattgcacgtttgcagcagagtccaaccacctttcccaatcaaagttcttggttcttctggcacaatttacaaaagccagtttcacaatggggagacgatgtaaattacgtgtaaccgaatcatcgacttatttacccctgacaaacagatacatacaaagacacccatggccagtgacgtaactaagggccttcactcctaagccacatagaactaacctcgggtacttccaatgctccaagcacaagactgtcctagtggtttacccaaatagtcaagaatacttgggatccctctagctcctgtggacttcgctaggtcagaggagggacgtttacaaagcagtgaatcctcactggatgaattcctggagaggtcggcaagtgagacgggggagtaagggagctgattgtcctcacagtgccctgacagctctaagatactctttaaaatggtccagccccaacgggtgctcctggcactaggcatggaaacggaagggtagcttagggacagttagtcgccttgagtagagctactgccactcatctgtgtgaatacctgctgatacttgggactcactcccatctaacctactagaaatacttacctgatgaaatgtctgttttcttatgtatgtttttctatgtagagacacatacatttttattatatattatgttttggagctgaagtgctagtcatgctttctaccacggagctacaggcccggtcccaactctatgttttttttaaaaaaaatacttttataaaatcacaacagtattaatctaaaaaagcattaaaaactcaatctagagcatcactttagtgttactctagggaaggctcacgtttttactgttcttccaggacagtgataatttaccacagaagcgttagcccttaggtctgctgtaaagcaagcccctggctgtcatgtaggaagtcaccccgaggtgtacacccctggctgtcatgtaggaagtcaccccgaggtgtacagttccacgggcttctcagcctgggctgcatctgaaaatcctgtgggactgggaagggcccccaagcaaatagcagcaggccctgactcgggcctggacgtgagcatttctgaggttcccacatgaccctgaggacgactgtatcgagcgttaacttgcattgccgaggtttcaggaggtcccttttgtgctactcttatggtctctggacgcctttcgtataccaaacgtaatggagattggcaagcctcacctatgtggggcagggaagacagctcatctgtagagagcatgtgactcatgcatcctaacattcattctgtagtactctaactctggttctctctctctctctctctctctctctctctctctctctctctctctctcggatccacaggagctacagtgacagctgcttcctggattcctccctctatccagagctagctgatgtccaatggtacgggcaggaaaaagccaagcccgggaccctcgtgtgagccggccaggctggatgtgaccaccgccacgccattccaagtcacctcactgcctctcatttgccttacccagatgcactgtcacctgcaccagcttcggccctcagcacttttcttctcctgtctccacatccctttcaccctcaaaaacctgactgaggagacattctggaaggttccgaacccactgtgtgtcccctggctctcttgcccagagagccagacaacaatcctcaatggcaccttggtggtttccgtctgccatgatacccaggccacaaactgtcaggaaagccaacacatgcaattcctgtagaagagaacaagaaaaaagctagccctgcctgcagatactgaagctgtttctggctgccaccctataggccggccgagtgcttctagaggagagtgctcaggggatatcagtttacacctgaaataaatctgccatagtgagacagccagcaagagctcctaaggggacgtgtgagaaagaagactggtgcttcagagacgcatcagaggatcacagttggttctatgctgccaaagattagacacattcaacaatgaacagataggaggggccaagaggaacacactttttctgcagcgaaatttcaattctaaactgctcctacgcagcacaagtgaaagtcaaccatcttagaccacgtcctgtcgtgacccttctcctggagcactcctgagagctgggaacaaacccaacgggacagtgaagatgaaggaggctcggctggcctggcagactcggactctatctgtctggacatgggaggagcagggtaccattaggactgccctatgcaggggcttcagcctacgcccccaaagcttccttccttttgggatggggaggaagccaacggtgaccatagccaaaagcagttctctcgttaaaaccaccagtaaaagtgtaacctttctgttttgtacaaggcctttcagtttttgtttttgggaaaccaagggaaaaagcacattgcaatctactcaagtgttttaccgttgtggttcattttatgtttgttaacacttgtgtgcactcggacagacctcgcctgtgtgtcgcttagtcagagaactcacgtacgcccttaggtaggaagactttttacacacgtctaccagttggcaggcagagcagagttgcaacaactcagctcccaaagggcccagacccctccagcagtatctgtgacctcgatacaccacctccgtccacagataccaagaggataaaaggcaaaaaacataaaagcacgcgtgcaagctgcttgtttacatgtgttttgagctatgcttaacacacaaccaaaaagccatcaatctccaaaggcctcagaaccacttctatactaactaaccagtgcacagtcttagtggggcatggcactaacgatggcacaagagtctctgtggaggtagtgtggcttgcaggggttaccttgtcatgacttcctgtggggaagacatctaggaccaggagccagggtgggaagaaagcaaatctaaaagttggctgtggcatcaaaagaaaaaaacttcctcatgtatttaaatccaagaataacaatagacattaccagactgggaaggtaagaaatgaacagcagaaaggactgaccctcactttgcagtggcttggaaacctctggaagtcaagtgggagcattcatcccatgtggcctgaggccttttctctcccattcaaggctgggtaccccagagctgggcatggttggcgtgatgagcccagcttccagaagcagtactcttcccagacacttgagggataaccctgtagggtgagtggggacgggatatgatggtacaaaatgaccctggggctccgtggagacggggctacctttcttgctcctagtatgatagtcggagctacataaagcaggtttatttggggactatttcttccttccttagctaatggaaatgtgacacattgtgccccattttctttcttccaaaaggagatgcctgaataatttgcctgaacagaaaacgtccaaaaggaaacaaagaacaagacaaggttacatggttacaggttataacagagacagcagtttgaaaattgattctgaagtccttcggatctatgagagatgcagaaagaatctaaatgtaatagatttggggagcagagggaaacggaatgggagctgtgaacaccatcacgatagtctggcagtaaggacagagatttaagtaaaacaggttttactgtttagctgtgttcggttaatacactgtacataatataatacgcattagtcctttgagactgacataataaatggtcgctgtggttggtgatgaacgctctaggtattgtatccaagcacctgcagattctttacacatccctgtttcttttaagggagatgaagtccccagtttaaagcccctattggattcgttggatacatgtaagaaattgcttgtttcagccagaagactatgttgtgagccaggttggtttattttgttatatgcaggtgagtgttggagtgttcaaagcccaatttgttttcatccagtattagtttagttctaaatatagcaagcctcacccaggtgctatcagatgaccaattactgcttagttaactaggtgtaaagttttacatatccattcatgtcaatagtttattacaagttgtgtaaaacggactctagtttaataattgggggggtggtaagattaggttgctcctgaaactgactgtagagcatgtaaaatgattttactggattctgttcaactgtaatcaatgacaaagatgtatgttgtagacaaagttgcagaattaaaaaaaaaaggaaatctgcttttaatttattctttttgtattaagaatttgtatagtacctttacattttgcagaacagtgttgtcaacacttattaaagcattttcaaaatgaaaacaccccagttgcctcttggacactttgtttctaaacgataaacatgtaaccacgctccagaaatctacatatcaagaagataatgaactttttttttttccataaacatcagcctacctatggcataccttttgggtttggcttgttctttaaaacagtctcattctgcacaacagctttaaaatcacaatctttttgcctccagcccaagtgcgggcgcacaccaccacacacacccaagtacacctggtattgttgccgtggtagagaggccagttctttgctataaatcatctaccctctaaatcatatcacctggacaatagccagttacagttacaaaagtcccccaattacagcatacggctactggcatgcattagcagatcactgcaattgtatccctggcctgttgtcacctgacagacagctctttcctaagcatacggctactggcatgcattagcagatcactgcaattgtatccctggcctgttgtcacctgacagacagctctttcctaagcatacggctactggcatgcattagcagatcactgcaattgtatccctggcctgttgtcacctgacagacagctctttcctagcaggaaactgaaaggctagcctccaggaacaccctacatggaaagcccttcctgacaaggggctagagcctgccaataagagcaacgatgcacgaagaagctggacctgtctgaaagtaagcagatagaacagtgtttcctacttcctgaactctggcaactgtctgggaaactgcttagggcactatcacactgtcccaaaataatctatacttgaaacaaaaaaggcctcttgtaaacatgttatacataaagatgccaaaatgagcctgtgctctaagatccgtcaaaggaaagcaactggaatttagcttcactcacacacacacacactcacacacacacactcacacacacacacacacacacacacacacacactcacacacacacacacacacacacacacacacacacacacacactcacacacacacacacacactcacacacacacacacacacacacactcacacacacccctacttctgcctctcacataatgtcaacataataactctcatttttatcttgattcctggagaacacaaagtaaacaccctgatcctgtagaaaatattaaaaatattcagtccctgacttcccagaataactgttaaaagacacacaaaactctccccagagtgtacagatccacttgaaggctgtgagcagccagtggcctctgtcaaggccctgcacacttggtacagaatccgtgtgctcagtcttaggtgcttgtgaatcagaaaaagcagcacaggatagagatttaaagggtgaggaactctagcagcattaaactgggaggagcttaagccaattcccaaggacactaacatacaggggctctcactcagaccttgcgcaaggagttggcctctctgagatgacagccactgaggtataatatataactgcctggtttacactaagtcacactgccagcaaagtcacttctattcagccaaggcaatagtgtagataataattggtattctagaataattggtgtacacgcacatgcacgcacatgggtgttttttattcttcgtagaagcacattttataagatgttatccttataagccagtagtaggttacttttgcttctctttctggtacccattttccctaaaactcactccagtcatgcactcctcccctccgcttcacctagccgagtcatcaagatggacgccttgtgatgccaacagctcccttttgtcattttatgcagcttaccatcaggcactgaatgtagacagtgttccttactctactgagataacttcttcacaccactatgtttgtttggactctcttactcttggctccctgtattttctcatcactattataaagtacctgagagaaaccacctcagggaaggttttatttgactctggtttagcaggcaaagggtagtaccaggtccttgcaagtaaacgtaccctgattcttggctgaccagaacacaaaacgcaaaactggaacaagaggcacatataaacttcaaagatcactccctagtgaactacttatatcacaaaggccccacatcccaaagatcccacagagcatagccatctagggaccacgtgttcaaacacacaagcctcctgagaacatttccgattccaaccataacacactgctctcctggtttgctgtgtcacctttctgctggcgacaccagcactttccatccattctggggctcttctttcaatctgtacttcctattgcctcttcaacagcgagatgtcaaaaacctaactcttgatttccccctccaaacatgctccaatggccaccctcaacttagaggaagtgccatcttcctagggctcaggtcaaagatcttgtaattatccctgatggctctttttcttcccacatctgcagtaaacaaaacagatatgaatgtccatccttgtgagatttatactgcattgtgggaaagaggaagaaaataaaaactgaatcatttaccagagaggggcaggaaagcaggcacagtagaagatttagcccgagacggaaagagtaatgccatttccaccacgtctgctaaggaagaatgctggtacacttacagtgcttaagagtgcttccaaattcaactagtgtgagaataaggttaaggccacagctacatgagacaggaaaaggggagtcaggatgcagcaacctcaaagcttcatacaagagtcccagaatcagagagagactgctcacaggagtaggaagtgctcttctgccttcactaatgtgcataggcgtgcaagctcccacacacgtgagcttacgtcacagacacacaaatacaaatgaacgaatacgtaacgaaacactaggattttacagaaagtgcaaaaattcagttcccttctctgaaatcccatgcttgtaggaatgccactatgatgacaccgttaaagaaagagaaaaaaagtttcattaaaattggcatacaggctgggatgagtcagtgattaagagcgcttggtgctcttacaaaggacccagattcacttcccagcacccacgcagcaactcaaaccatctgtacctctacttccctgggatcagatactgttctgacttccataagcactgcccaagtgcagtaagcttaactacatgctggaaaaatactcatggacataaaaataagtctataaatgtttttaaaagattaccaaatgaaatgattttttaatggggtccctactcaaagatagctgaaaagattatatcaatatccaagctgggcatgagatttgttccttcccattaacaattagcacaacaattggcctcagccatagtacaacatctatgtccataagaatgtatacataagtataaactagcaagaggggctggagagatggctcagtggttaagggcattgactactcttccagaggtcctgagttcaattttcagcaaccacatggtggctcacaactgtctgtaattggatccaatgccctcttctggtgtatctgaggacagctatagtgtactcatatacataaaataaataattctttaataaaaattaaataaattcaatttttaaatgaatttaaaaattcatttaagcaagaaaatgtacaaaactcaacaggagacaacaggcatgaagtctgtcttgattagagccttcctaaaaggaaatgtacagtagaggtgtttcaactgggttatcatcgggtgaacacaaactaagtccacaatgtaaccctgctaaagcaaaggtttcagaagacacttcaaatatgagcagatgtagacaaactaaactctcaagtccccaaagcaggcgtgtgactagtatacgccccatgggaactcctagagatgaaagtatgcttaccttactctagctataataatctatattcaccaagaaaggcataaataaggttcatgcaaagtggcacaacccgtacgaaccacagctatgcacaagagtgactcccagaaacctaaacttccactgaacacggcacataagaaagtcaagcacactgatttccaaattgggaaaacacacaaacacagaatcaagcaagcctaacttacctgctacatacttaaggaagtacacaggactttataatatgctaaatttcttaccaaccataagggccaagtgtcacctgtatattaaagaggattcaactccttatgctttgacttctttcaataagtcatttccttccttaacccagctagtaattcccttataatcagaagttttcatgatatattaaaaggttgtcgactgagagggtcacaaccagcgtattctttaaagaaaacatacaggctgcagaggtgggtcagtaggtgagagcacttgacgtacaatcgtgagggcctgagtgggagagtccacgtgaaagacggacatacagtaatgccagtaattacagcctttcttcaagaggatgggaagtgtacagaagccccagagccttgtgtaccagctagcctagaggatgcagagccttgtgtgtcagctaacctggaggatgcagagccttgtgtgccagctaacctggaggatggagagccttgtgtgtcagctaacctggaggatgcagagccttgtgtaccagctagcctagaggatgcagagccttgtgtaccagctaatctggaggatgcagagccttgtgtgtcagctaacctggaggatgcaaagccttgtgtgtcagctagcctagaggatgcagagccttgtgtgccagctagcctggaggatgcagagccttgtgtgtcagctaacctggaggatgcagagccttgtgtgtcagctaacctggaagatgcagagccttgtgtgtcagctagcctagaggatgcagaaccttgtgtgccagctagcctagaggatgcagagccttgtgtgtcagctaacctggaggatgcagagccttgtgccagctagcctagaggatgcagagccttgtgtgtcagctaacctggaggatgcagagccttgtgtgtcagctaacctggaagatgcagagccttgtgtgtcagctagcctagaggatgcagagccttgtgtgccagctaacctggaggatgcagagccttgtgtgccagctaacctggaggatgcagagccttgtgtcagctagcctagaggatgcagagccttgtgtgccagctagcctggagaatgcagagccttgtgtgccagctaacctggaggatgcagagccttgtgtgtcaggtaacctggaggatgcagagccttgtgtgtcagctagcctggaggatgcagagccttgtgtgccagctaacctggaggatgcagagccttgtgtgccagctaacctggaagatgcagagccttgtgtgtcagctagcctagaggatgcagagccttgtgtgccagctagcctagaggatgcagagccttgtgtgtcagctaacctggaggatgcagagccttgtgccagctagcctagaggatgcagagccttgtgtgtcagctaacctggaggatgcagagccttgtgtgtcagctaacctggaagatgcagagccttgtgtgtcagctagcctagaggatgcagagccttgtgtgccagctaacctggaggatgcagagccttgtgtgccagctaacctggaggatgcagagccttgtgtcagctagcctagaggatgcagagccttgtgtgccagctagcctggagaatgcagagccttgtgtgccagctaacctggaggatgcagagccttgtgtgtcaggtaacctggaggatgcagagccttgtgtgtcagctagcctggaggatgcagagccttgtgtgccagctagcctagaggatgcagagccttgtgtgccagctagcctagaggatgcagagccttgtgtaccagctaatctggaggatgtggaggcaaaacaacgggcatcccattgtctcaagcaggatggaagatgaggcctgaggtctgacatcttcacatgttggaatgtgtgcacacaccaccatcaccaataacaacaaacaaacaatacaaaacccagcaaataaaagccagaataggaacacatgctgcctcagacatggccaggcagtgtttgtttcggtcctctgcgtgggtggatatgtgatgcagggtctagagcattcaccattcacggtaaccatcagggacactcacatgtacaacttgaactctttcacagtgggcagtctcagccaagctcaggctgcaatacccataggtcatagtgtttctaagtcttcaaagaaaagcatgcttaatgcaaaggcaacttggttttgacaggttgtaaaactgcagctgaaagcctgtgggactgacttagctgccatgaaggaagcccaatgaatgaagctgaggtcaccaataacacccaaaaagaaagtggaaactccccagtggcggctgtcctttgctgtcctttgaagtatgcattaagcttggccactgggggtgggggtgggcagctaacagttatttcagagcagggcttagggataaggaagaaactagacaaaggacgtggcctagctaaaatacagtcatatgctgtgctaaagtatcccagtttaaaatgtgaaaaatacacaaatagtcaacgttttaatagtaaactattttggccaatgtataaaccttattctttttgtaatgagcacaactccaaaattttggctagggtcagctcacgtccagcctttgctgctagccagccacagggcactccctagttactctacaccaccagaaactgtttttaaactttcaaaagactttatgttattgttaaccatttaagttccaggggttaaaattcagccaatgcagctgcagagtctatgataaaaaccagttaccacagcagttttccaaagggaccctctagagacttgtgctggcctcagctctctggacagctggaaactcttccatcagtaaaccgtgagaaagtgcttttcggttcaagactcccaatatgatgccataccataaatttctagaggataaagttatgctttcaggggttgtgtgggagaaaactgcaacagggaggaggtacgatccattcagttatctactcaagatgctcagacaaaagaaacgtaaagttcgagactccctttcattctggcctcccttctgtggtgagcagcactcgtggggactgcgtgccaggaatggaaccagacaccaactcccaaagccaagcctcccaaagactgggaaaacatttctcgcctttctcaggctgttcagtttcagaattccctttcaacagcaataaccaaggtttgcattcctaaatgatttactgtgctccaactccagcatagttaaagcgctggactaggttaaatcacaccacagttacaagtcctgtctgcttacttcccaggccttgcgggtctacgcgtgattgccaagttccatttgtgacccctgcctgcctcattctgttctcccagggctgtctcccttctcatacagaatccagacaaatcttaggccactgctgtatttccctgatccccaccctccaacactgaaattactgccattctagactgcctgctataggccattaaacagtgaaagatccattcacttgacagtgacactcctagaaaatgagacagtctccttacgaccactcaccttctattaaatgaaatcagtaagcactcagtagaaacggcaccctggaacaggaacttgggggtctcttccagggctagccactcacagttcaaccctctcttgatgctgggtagtggtctctccacagtgagctatcaaacttgatcctcagagaaaataactgtcactcatccaaagcagctacaccactttcaaaatagtccatggacttggaaggctctactatacaaagcagctgtgctggacggctttgcctagcaacaggctaatggatgggttcctagcacttaaagcagcctaagtcaagccaatcattaggggcatttgatgcatttctgatgtactctatgttcaccatacatacatacatacatacatacatacatacatgcatacatgcatacatacatattcagatgtactctatgtcaggatgaatcccgcaatgaatcaagcagcacctgtattgatttctaaggaaagggttttttactaaatgtgaatacagagaatcccagttcttgtgatggaaggatggggaggagagaaacggacacagtcaatagagttgtaacttgtttaaaagaaatctttgttgttttaaaaacaatcttgaaacaaaaatatatagtataggcaaaagtaaaatttccatttaatgaaagaaaggtcatcttcctacatatcccaggagtttctatgtagcttctttaatttgtacatagctttttaatttcggttatgaaaaacttgactgagagccacattcgtgaacatgcttctctccacccagcttcagaatggccacagtcccagtcctggagaatacgaattcccctgcagacaaagcaagctcaaaaaacaaacagacaaacaaacaaataacaaaacaaaaccccagcccacacagatcaattttaggaagtactgatgtcatatgatatagtttcttctttatgtggaatttttaaaaaaagattttatttatttttttatgtatatgagtacattgtagctgtcttcagacacaccagaagagggcatcagattccattacagatggttatgagccaccatgtgattgctgggtattgaactcaggacctcaggaagaagagtcagtgctcttacccgctgagccatttctccagcccctttatgtggaatattaacaagagaagacaacataaaatgacttaccatgctgtgtggcctaacagtggatgaagaatgagtgatttgggcatttctgatagtatttataaagaagacttttatgaccaaaccacatgtcacagtagggatttgctgcacatcttatgagagtttcttctttgtcaagtaagtcccaaggtacacctgctttcatcttaggaaaaggcttcagctggagtgcaagggaacactgattcaacccaagacagccaccaccctgcaaacaactggcagaagctatcctatctatgcatgccttggaccttaaggagcccaaagtggctttctcaggaggggccagcataagcaactgtgaatctgagccacctacagcagcccccaggtcctgttctctgcactcctaaacttggacctgactgaaagtaaagatggggggcggggggtagagaaacctaataatgactccttcacttactattgctgctaactcagttgttgttgttgttgttacatgagtacatactatcccagggtagccacagggccccgtaaaggccctgggtctacactgtaataagcaataataatgatctcttatcatctgccaggcagcagactcagcatcttacacaatatcgatgtgaggtatggactcttagcatcaatgtcagacaaagaagccaaagctcagcgagatggacccacatgcccaaagctgtagttagatcgagcatgtccttgagaagctgtcagtcctggtttggcccactccctcttccttctctgacaccacacccaacccatctgcacacatcagtgaactagtccagacctctcagcattgcagcacagagtggtcacggtgaccaaagctccattctgtaagccctagagcaagtcatgttgtgaggcgagtgaggaccaagtgaggcacagggaagccaggaacgccacaactctccggcatccagtcccgaggctgccactctcagctggatc

SEQ ID NO: 1139 - DNA, 5664 bp, Mus musculus
tagatgacggagggccgtcgatgtcaagtacatctccttgatgacaggaagctggagctgctagtacagcccaagcttttggccaaggagcttcttgacctcgtggcctctcatttcaacctgaaggagaaggagtactttggaatagcattcacagatgagacgggacacttgaattggctccagctcgatcggagagtcctggagcatgacttccccaaaaagtctgggccggtggttctgtacttctgtgtcagattctacatagagagcatctcctacctgaaggacaatgctaccattgagctcttcttcctgaatgccaagtcctgcatctacaaggagctgattgatgttgacagtgaagtggtatttgaattagcttcctatattttacaggacaagcaggggataccatggtggctgggactgagctacaaaggaattttccagtatgactaccatgataaagtgaagccaaggaagaaaattttaggtgttataattatcaaaggtatggcgtttggctccattctccaagagcagatgggcaaacaggctctgagcggctgtcatatatttcaatggagacagttggagaatctgtatttcagggaaaagaagttttccgtggaagttcatgaccctcgcagggcttcagtgaccaggaggacttttgggcacagtggcattgccgtgcacacctggtatgcgtgtccggcattgatcaagtccatttgggcgatggctattagccagcatcagttctatctggacagaaagcagagtaagtccaagatccatgcggcccgaagtctgagcgagatcgccattgacctgacggaaacagggaccctgaagacctcaaagctggccaacatggggagcaaggggaagatcatcagcgggagcagtgggagtctgctgtcctcaggttctcaggaatcagatagctcgcagtcggccaagaaagacatgttggctgccttgaaatccaggcaggaagctctggaggagacgctgcgccagaggctggaggaactgaagagattgtgtctccgggaagctgaactcacaggaaaattgcctgtggaatatcccctggatccaggcgaggaaccacctattgttcggaggagaattggaacagccttcaagctggatgaacaaaaaatcctgcctaaaggagaggaagctgagctggaacgcctggaacgagagtttgcgattcagtcccagatcacagaggccgcccgccgtctagccagtgaccccaatgtcagcaaaaaactgaagaagcaaaggaagacctcttatttgaatgcactgaagaagctgcaggagattgaaaatgcaatcaacgagaaccgcatcaagtcagggaagaaacccacccagagggcttcacttgtcatcgatggtcagtgccacccacaagctcctgccccgctcccagacaaccagtccctggagggactcaggcagctgcactatcaccgtaccgactatgacaagtcacccttaaagcccaaaatgtggagcgagtcatctttagatgagccttatgagaaggtgaagaaacgctcctcccacggccattccagcagccacaagcgcttccccagcacaggaagctgtaccgaggcaggagtaagcagctccttgcagaacagccccatccgaagcctcccacattggaattcccagtctagcatgccatccaccccagacctgcgcgtccggagtccccactatgttcattccacaaggtcagtggacatcagccccacgagactgcacagccttgcactgcactttaggcatcgaagctccagcctggagtcccagggcaagctcctgggctcggagaacgacaccggaagccccgacttctacaccccgaggactcgtagcagcaatggctcagaccccatggacgactgctcgtcctgcaccagccactcgagctcagagcactactacccagcacagatgaacgccaactactcaacgctggctgaggactcgccgtccaaggcgcggcagcgacagcggcagaggcagcgggcagcaggcgccctgggctcagccagctctggcagcatgcccaacctggcggcccgcagcggggctgcaagcactggaggtggcgtgtacctgcacagccagagccagcccagctctcagtaccgcatcaaggagtacccactatatatcgagggcagtgccacacccgtggtggtacgcagcctggagagcgaccaggagggccactacagcgtcaaagcgcagtttaagacctccaactcttacacagctggcggcctgttcaaagagagctggcgcgggggtggcgacgagggggatgcaggccgccttacaccatctcggtctcagatcctgcggactccttcgttggggcgtgacggcgcccacgacaaaggctccggccgtgccgccgtgtctgatgagctgcgccagtggtaccagcgctccacagcctcgcataaggagcacagccgtctgtcacacaccagctccacctcctcggacagcggctctcagtacagcacctcttcccagagcaccttcgtggcgcacagcagggtcaccaggatgccccagatgtgcaaggccacgtcagagctagctgatgtccaatggtacgggcaggaaaaagccaagcccgggaccctcgtgtgagccggccaggctggatgtgaccaccgccacgccattccaagtcacctcactgcctctcatttgccttacccagatgcactgtcacctgcaccagcttcggccctcagcacttttcttctcctgtctccacatccctttcaccctcaaaaacctgactgaggagacattctggaaggttccgaacccactgtgtgtcccctggctctcttgcccagagagccagacaacaatcctcaatggcaccttggtggtttccgtctgccatgatacccaggccacaaactgtcaggaaagccaacacatgcaattcctgtagaagagaacaagaaaaaagctagccctgcctgcagatactgaagctgtttctggctgccaccctataggccggccgagtgcttctagaggagagtgctcaggggatatcagtttacacctgaaataaatctgccatagtgagacagccagcaagagctcctaaggggacgtgtgagaaagaagactggtgcttcagagacgcatcagaggatcacagttggttctatgctgccaaagattagacacattcaacaatgaacagataggaggggccaagaggaacacactttttctgcagcgaaatttcaattctaaactgctcctacgcagcacaagtgaaagtcaaccatcttagaccacgtcctgtcgtgacccttctcctggagcactcctgagagctgggaacaaacccaacgggacagtgaagatgaaggaggctcggctggcctggcagactcggactctatctgtctggacatgggaggagcagggtaccattaggactgccctatgcaggggcttcagcctacgcccccaaagcttccttccttttgggatggggaggaagccaacggtgaccatagccaaaagcagttctctcgttaaaaccaccagtaaaagtgtaacctttctgttttgtacaaggcctttcagtttttgtttttgggaaaccaagggaaaaagcacattgcaatctactcaagtgttttaccgttgtggttcattttatgtttgttaacacttgtgtgcactcggacagacctcgcctgtgtgtcgcttagtcagagaactcacgtacgcccttaggtaggaagactttttacacacgtctaccagttggcaggcagagcagagttgcaacaactcagctcccaaagggcccagacccctccagcagtatctgtgacctcgatacaccacctccgtccacagataccaagaggataaaaggcaaaaaacataaaagcacgcgtgcaagctgcttgtttacatgtgttttgagctatgcttaacacacaaccaaaaagccatcaatctccaaaggcctcagaaccacttctatactaactaaccagtgcacagtcttagtggggcatggcactaacgatggcacaagagtctctgtggaggtagtgtggcttgcaggggttaccttgtcatgacttcctgtggggaagacatctaggaccaggagccagggtgggaagaaagcaaatctaaaagttggctgtggcatcaaaagaaaaaaacttcctcatgtatttaaatccaagaataacaatagacattaccagactgggaaggtaagaaatgaacagcagaaaggactgaccctcactttgcagtggcttggaaacctctggaagtcaagtgggagcattcatcccatgtggcctgaggccttttctctcccattcaaggctgggtaccccagagctgggcatggttggcgtgatgagcccagcttccagaagcagtactcttcccagacacttgagggataaccctgtagggtgagtggggacgggatatgatggtacaaaatgaccctggggctccgtggagacggggctacctttcttgctcctagtatgatagtcggagctacataaagcaggtttatttggggactatttcttccttccttagctaatggaaatgtgacacattgtgccccattttctttcttccaaaaggagatgcctgaataatttgcctgaacagaaaacgtccaaaaggaaacaaagaacaagacaaggttacatggttacaggttataacagagacagcagtttgaaaattgattctgaagtccttcggatctatgagagatgcagaaagaatctaaatgtaatagatttggggagcagagggaaacggaatgggagctgtgaacaccatcacgatagtctggcagtaaggacagagatttaagtaaaacaggttttactgtttagctgtgttcggttaatacactgtacataatataatacgcattagtcctttgagactgacataataaatggtcgctgtggttggtgatgaacgctctaggtattgtatccaagcacctgcagattctttacacatccctgtttcttttaagggagatgaagtccccagtttaaagcccctattggattcgttggatacatgtaagaaattgcttgtttcagccagaagactatgttgtgagccaggttggtttattttgttatatgcaggtgagtgttggagtgttcaaagcccaatttgttttcatccagtattagtttagttctaaatatagcaagcctcacccaggtgctatcagatgaccaattactgcttagttaactaggtgtaaagttttacatatccattcatgtcaatagtttattacaagttgtgtaaaacggactctagtttaataattgggggggtggtaagattaggttgctcctgaaactgactgtagagcatgtaaaatgattttactggattctgttcaactgtaatcaatgacaaagatgtatgttgtagacaaagttgcagaattaaaaaaaaaaggaaatctgcttttaatttattctttttgtattaagaatttgtatagtacctttacattttgcagaacagtgttgtcaacacttattaaagcatttt

SEQ ID NO: 1140 - protein, 899 aa, Mus musculus
MTEGRRCQVHLLDDRKLELLVQPKLLAKELLDLVASHFNLKEKEYFGIAFTDETGHLNWLQLDRRVLEHDFPKKSGPVVLYFCVRFYIESISYLKDNATIELFFLNAKSCIYKELIDVDSEVVFELASYILQDKQGIPWWLGLSYKGIFQYDYHDKVKPRKKILGVIIIKGMAFGSILQEQMGKQALSGCHIFQWRQLENLYFREKKFSVEVHDPRRASVTRRTFGHSGIAVHTWYACPALIKSIWAMAISQHQFYLDRKQSKSKIHAARSLSEIAIDLTETGTLKTSKLANMGSKGKIISGSSGSLLSSGSQESDSSQSAKKDMLAALKSRQEALEETLRQRLEELKRLCLREAELTGKLPVEYPLDPGEEPPIVRRRIGTAFKLDEQKILPKGEEAELERLEREFAIQSQITEAARRLASDPNVSKKLKKQRKTSYLNALKKLQEIENAINENRIKSGKKPTQRASLVIDGQCHPQAPAPLPDNQSLEGLRQLHYHRTDYDKSPLKPKMWSESSLDEPYEKVKKRSSHGHSSSHKRFPSTGSCTEAGVSSSLQNSPIRSLPHWNSQSSMPSTPDLRVRSPHYVHSTRSVDISPTRLHSLALHFRHRSSSLESQGKLLGSENDTGSPDFYTPRTRSSNGSDPMDDCSSCTSHSSSEHYYPAQMNANYSTLAEDSPSKARQRQRQRQRAAGALGSASSGSMPNLAARSGAASTGGGVYLHSQSQPSSQYRIKEYPLYIEGSATPVVVRSLESDQEGHYSVKAQFKTSNSYTAGGLFKESWRGGGDEGDAGRLTPSRSQILRTPSLGRDGAHDKGSGRAAVSDELRQWYQRSTASHKEHSRLSHTSSTSSDSGSQYSTSSQSTFVAHSRVTRMPQMCKATSELADVQWYGQEKAKPGTLV

SEQ ID NO: 1141 - DNA, 383562 bp, Homo sapiens
  misc_feature (1)...(383562): n = A, C, G or T/U
aatatattgttctatagtatgcaagtcagaatcttgccttaatgtcatttttttttttttttttttttttttgagatggagtcttgcattgtcgcccaggctggagtgcagtggcacgacctcggctcactgcaacctctgcctcccgggttcacaccattctcctgcctcagcctcctgagtagctgggactacagacgcctgccaccatgcccggctaatttttttttttttttgtatttttagtagagacggggtttcaccatgttagccaggatggtctatgatcttctgaccttctgatctgcctgccttggccttccaaagtgctgggattacagatgtgagccactgcacccagctgccttaatgtcatttcttaccacccttgttctcacagacagaactgtgctatctcatgtaattttcatgtcaacagtctattaactgcattcgtgccatagaggtttaaaattcttagaatggagtacccccagcaagcaagagcagttagaatcccctactcatcctcatctacctctaaggatttgtccactggaggtgttttacccattctggtcacagcttgcactttggtgttttgatttacaggatgttgggtatactctagaacacattcaacataaaccatattcccatgacatgaggcttcaaagagactgtctttctaacagattcaagatgctttcttttcttccttcctcactttgggaaaatataccacgtgactcatcccagatgtccatgagcaaatggacagttgaccctgggagtgatatgtccctgggcacaggagcgaaaggaatctgatggccctaaagaaagccattgtcctttgcagcaccagagggattacttgaaccaagatgaactattcccctgttgaagaaaattgcttgttaaatttctcctcctggaaaaggaagcatggaaattagaaacagatgtaaaagttgatcattcgccacccaatccttattaagacacctgaaatttgagagctaagcctagtaaaaattgagtcaacagctattggctctgtttggaggtatgctatatatattcagcgaatcctgggcagtcaataccatagataaggacgttatttatattgccattccaggtgcaattacacagtttaccctgtgaaactgcacttcataaacatggcaaatcaatgctagttatcaaaatccatccacgactgacagcacatgaaaacgggctttgcaaaatgatcttgaaagccaatctacacagccagcttcacagaggtcagcttattacccgtttaatcacatggccatcttgcaggagcgttattcctcaaaccctgggcatgacatcactcctaatagcacacacaataagccattactaccatgtagaatagcctttagccaggctatagccactgatgacctgatttggcctcatgctgggaagggcaagtggagttcttttggggacaaatcatatcaagaccagatgtgaaggaccttcgtgtggaggcataaaatccatctgcagcttgtgagcaagatctctgtctgtggatgacgagctgaacagcctgcaaggatgctgatgggccttgtccttgatgtccataaggcaaggccttctgacacagataccgacaaatcttccacatgggtcattcatatttgacattctctatggctagatccttgccagaaagatcgagtgagatcctgggacacctgattttcacatgaggtttccatgcagcagatggtgcattttcctccctgccctgcaagaggataaggtctagcttcctttgtcatgtgtgattttcatttgatggggatagggggtcttaacctgggtgaattaattctgtactcatagttactcaaatgaaatctactaaacagggagctctcaaaggttcaagaagaagtctgtttaccactcaaaataggtggctaagccggatggcctttaaggaattcaggcagatgaaacgtggaccttatagcagaacagacaggaagaggcagatggctagacggtgaagtgcaggaggctgttgtggcaaatgagacaacaggaaaaccgtgtgcagaattgagactggaagaaaagggaaggtgcacacgtcttgtttacaaagaactttcacaaacattgtttcatcctgttgggtaggtgttcagcagacttgacattctctatgactgatgctcgctatgatgaagattgagtgattgatgcttgctatgataaagatttagtgagattctgggatgtccaattagcacgtgaagttcccatgcagcacaggctgcgttttcctccctgccctggaagagggccaggtctacttccccttgtgatgacattttcacatgcagactcagggctaaggccagcagtctttcacttcaccacagacgcctcatcacagagaggagctgagtttgaggaacaaaagaaaactcttccaataagcaaaagttatcttgcatccccagttcttggctcagcacttgatccgttgtagtgacacagaagagggaggcggtcaatggacactggagcctctcattgtgaccctgagtgagttacttcagtctctgtacctcagtccttttgtcttcatccagggaaaataagagtacctatttgataaagtgtcatgagaactaactaaattatatattttaaaactttagaatagtgcctgtaatagaatatgccgtataagagaattgccttattttattagacactcaataaaataatggttgaatgaatgatgtaacataagcaataaatgaaaataatacaattcatttagacaaggatgaagccagtatcatggagcttggtacagaatacaagaagagcatgggcagtgtcatggcagaagcgaggagttgaccacttatcctagaacaccacaccctctcccacagcaaggataagcaggagtcaaactgcacaattcagtctaaacatcctttatctcatttgcctggctgctcatggaggacaagtattaaatgaagcctagactgcagtccagcaaggcaagggaaggaagagagagtcaaggaagggaaggggaaggaggggaggcgaggggaggggaagagaaaaaggaaggaaggaaggagaaaagggaagggaagaaagagaggaagcaaggagagaagaggaagggaagaaaggatgaaaggaagggagggagggaaggaaggaagaaaggaaggaaaggaaggaagggagggagggagggagggaaggaaggagaaagggaagggaagaaaagattaaaggaagggtgggagggagggagggacagaagaaaaggaaggaaagaagaaaggaaggaaggaaggagaaagggaagagaagaaaggatgaaaggaagggtgggagggagggaaagagagagagagaaggaaggacagaagaaaaggaaggaagaaaggaagggagggaggaaggaaggaagggagggagggaggaaggaaggagataaggaagaaaggatgaaaggaagggagggagggaaggaaggaaggaaagaaggaagaagaaaggaagaagtaaggaaaggaaggaagggagggagggagggaaaaatgtatctgcccaccctagctagctacaattctgcctagagtcttccaaatggcacaggaggaggaaaagtctgtccaaagacagatactgcaaacagcgcactgtgtcagagcaaaccgtaggtaaaaccaagagaaagctttcccacactggtgagctggagataatctcgcagcccctgggcatgtgaggtctggtgataggagtgttgcttgatgtcttggtcctgttcttacggatattgggtttcatgtttggcctaaattccagccagttttcaaacagaaaattatggatgtaggcagcctttctgtttgtctaacctcagtcccagcttcctctaatgagacgtgacatgaattacctaggctatagctgggtggggaggtaatgggatggagatggaatgttgaagaaacacagggtttcccttccaaactcccccctcctgctctaggaattttccaagtcttttaagaatgtactttttgaagattcagctatttttcatttttgtattgatatataatacacgtacatattaatggggggcgtgtgatattttgttacatgcatagaatgtgtaataatcgagtcagggtattaggaagaatatgttttcttcttgcgtgtgttttggttcaatttcatcctattgctcctcttctcttcttcacatgacaataattacaacaccaacttccatcaaagcgacggtttctcccatcccccagctgggggcaggttcgggtgatggctgcagtgggaaccatgggtgtgtgtctccacctccaaatccttcccctgcatccccacccacctccccgatactcactgcgctgtcttcacccgtccagggctgaagtggaccagaggccagggcctagcagggagctttcatgcctgagctgtcatgggctggccttggactttgggttttttgtttgtttgtttttgttttgaaatggagtttctctcttgttgcccaggctggagtgcaatggcacaatctcggctcactgcaacctccgcctcccaggctcaagtgattctcctgcctcagcctcccgagtaactgggattacagggatgcaccaccacacctggctaattttgtatttttggtagagacggggtttctccatgttggtcaggctcgtcttgaactcccgacctcaggggatccacctgcctcagcctcccaaagtgctgggattacaggcatgagtcaccctgcctggctgggctggccatggttttctctgggactaatgggtgtttaagcccacctcttgtccttgcagggtgccttgtgggttttttgctggggatctctggggatttatctctgcaattccctggtccaagagatgtctctcttccaataagccatttcaggcacctctctttccctgagccccacacccctcttttgtttccctctccctcctcctacagcctggaggtgaggtcattgagggatttcaaacctgcttctcagacaccccttgtgcatgtcctgcttagaggcctaactccttgagtggcgtgtgggagagggtgggaatagttgccatctattgcctggagccctcaaacgacactgagaaagagcccgcttttaataccctgcaagatgttacaaggaagtatggctcaagatggaggttaggacagatatttacaatgtcagccttggattgtttctgtttccttcatgtaagtggtatttcgccttttttgcaaaggaaagaatgataaggaacaaaatcagaaaggccccttaggtcaccttcccatctctttctccagctcaccatcctttgccccttctgctggggctcatggtggcctcagcctgccttctgccctgggagtgtcacgacagcatctattatacagtgtgacctcagtcacgtccccagctgaaacctgtctgtcctgtggcctgtcctttcagtattctgccaaatgaacaaaataaagcaatgaaaatgagtttatttagtgccagcaagtggcagttctgaggtcagatgcacatgtgagtggacttccaggggacagacaggccagcctcactagtggtaatttcaggcactgggcaaaagattggacaaatagttgaggccggctcatcaggatcaccctgggctgcaatgaccaggctgcatgtccgtgccagcacccaggattccatcaggagatcatttacccttcacgtggcttttcagcatgcatccgcgcgggcactggcttcatctatgagtctgctcctgtgaccgtgcatacacgttggctcggcagactcttccccctcctgctgctgcctccattatcaccaacactgcaaaatgttctctctccaatggaacattccccccattcccgccacccctttcacaccctgctgttcgtgaccaagaacacccatttgctttgatacatcttgctgtggcatgtcaagaccattgactttcctgaaacctggctcaatggattcctatgcattttccttccagggttttaatgcaaacattttcattaagactggaaggaaatgttcaaagcaaacaaacaaaaggctttgccagccttaagtgtgctgctccctgaggcatcaaaagcagcagcttcggagagtctagaactgaagagtgtcttctacatctccctctcctgcacacagtttgttgactgccccccatccctgaggcatctttcccccctcaactcccaccccacatccagcagccattaggccattcctggatgctgagggtaccgtgtcatccactatcctgacaacaacctgctctttctatgtaatattgttccataggttttcctcttgctgttctttttttttttttttcctttgagacagagtctcatgctgtctgcctcccaggctggagtgcagtggtgcaatctcagctcgctacaacctccacctcccaggttcaagccatcctcctgcctcagcctcccaagtagctgggatgacaggtgcccaccaccatgcccagctaatgtttgtgttcttagtagagacggggtttcactatgttggccaggctggtcttgaactcctgacctcaggtgatccacctacctctgagtcccaaagtgctgggattacaggcatgagccaccgtgtcccgccttctcttgctgttcttttcagttcacccttaattcaccatttcccattcctttggtccaatgtctcggtccctcagggctggcccagagccacatatactcagatctatggctctccctttccctgccctgcctatatggctatttccacagttccctttcaactggctggaagatgctgccaggagattggaaggcagatggaaagaagggccaggcatttctcctcacctccccttgaccatggatgaaggcttcagcagcggctgagtctcccactggatgggtctccaaggttctagactccactaggtgacctggcccctggctctaataactcggctcctcccttgaccccttaggccagcctccctgcctccccctttgtggttcttagcccctccgtcccctgtgcccaactcctggtgacatcaaagcagcagctccagaaactctaaaattgctcaatctaacaatttcctatattgacattctcttcttttcaaagacagagttttccattttcctgttgggttcaacggatgtatcttcctttgggatttccaaactgctgtaatctgataaagtcctgtaggacaggcaagctgggccctgaaatcacaccagttgactttggttttcatcctagctctgacatttctagctgtgctgccttggccaacttactaagcccctctgagcaccagtttcttcaccactgaaacagggataatgaaacgcatttcctccatggaagtagcctttgataacctcacagcacatggcctgccaatgggtaggtgctcagtgaacattcattccccttgcttctcctaaagtggtcataactgtgagagtatgaatgcatatcccttccggggaaacatatttgtattctaacaatggaaagaaatacttggccaggcatggtggctcatgcctgtaatcctagcactttggggggccgaagcgaggagattgcttgagcccaggagttcaagaccaccctgagcaatatagtgagaccctgtctctatttaaaaaaaaaaaaaaaaaaaaaaaagacctaaactcgacaattaattttgaatatgtaagtctccgacacccatggcaagacaatcagaaagatatttttggacaagcaacctttgagagccttgaaatcactccaaggagggggtcacctactccgcggggactggggagggctccattatctgggaggaggcttttgtgctaatatgaaaagtgatccttctccccgcctcccaagggaaggatgtggaatgtgtgagactcagatgtgtgggagtctggcccagggttatttttgttaccattaacattctcttctatatgtattttaaccttaatcaaatgcatgtgtttttgttttatttgcacttagttcatcaaaatgtcccttatgatctgaactatgccataagcctaagctccacagtgaaacactcattaatacccctgggaaacaggaagttgcatttagtcaaatgtaaataaattcagctccccggggctttgccctggcctgggtcagagaagaggacagtggcttctcagtccatctcatcattgtcccccccaccgaccccaaaactgagctggaagaatgacatgccgtgactctcaacagataaagtgttctgaaaatgtgcctatcctttgttcaaaaccgttacaacgtcaagtgcagttttacaaagaaatgagtttctcttgctttggctcaatcatcgggtatcgttccagattttttcccaccccccgccaatgctctgaaaccaggcagtgcaggcaagaagcaagaaagagagaaaaaagagatgtaaacctaaaccacctcaccaaagacgccgtgtgagccgtggttaagaggtttccgtctccccctgtctctctcaccctctcactgactctcctactgcacacatggaaccaattacgaacaaagcccaattgttgtatatttggaatttcccacatcaacctgatgctttctttaactgactcgcgatgtgtgtctgcgctggagggctgaacccaggtttccagcccgtgcgctgctgccgccgccgtggcacccttcgcctctttcttctgattcattttctcatagtacaaaactctgcttctttccttcgcaccccacccccatttcctattaggtgtgtttgaataaacagaaccttcatttccgtcattttcaatgaagtaagcacactggtctgcagacagtgtctcaaagctggtgcccagagcgtatgagtggtatcaaggctaataccaaaaaccacgggatgattacaaaggaaatggccatccctttcataaaactcagaacagacagaagcagtgtatgtagaaatgctttaaaaagaaaaagaaaaaaaaaacccaaacataccccatatcctggaagcaccttacttgattttctttgtagtaattttttctgctatggaaataagccgatttcaggaggagtagagatggggaaggtaggggaaaatattacagaaaagttaacgtttgagaccatttatgccatccatcaaagaaggctgtgtgatctgaaattacacaatatgatcagaaaataattgacagacgtgatggatgaatctgcttcgacacagccgtgtaaaacgaaacataatttcttcttgtttactggcacacgtaaaaataaatgttctataacacaaacatttaaatgagaaggtgccaaacacaagcctgttcgatttgatttgattcatctgaaccatgtgattgcaacagtttcttcttctttccctcatactttctctctgtggactgtattcacatatacagtgagtaatacccgtgcgtttatttttatgcgttagaaagcaggaagggtaaacagatacgcatgtctgatgctcagttttatagatagaatttatgatttcaaagaggtccctgatgtgttctgtctgtggtcttcagatattgttcctccgttcagaagggagtgaaatcagagtgtaggattctgcattaatctccactccagatggtgatattccaaatagtctttttaaggtgagcatgtgacctactgtacggccgaggggcttgggagtcacgtgatggaatgaataatacgtctgatagagctttgattagacaactgacctgattaccatctgcagccacgagaagcaaagttgacatttctggatcactctccccagacgcgtcacttgcccacaagcgggacacggcagtctcgctgagccagctgtgcagagggacagatggaagaaagctagagatgctgcttcgtgggcgctgaagttgcagaacttgggctggttttctttcttcccatcccccctcctcctgacaaaccacatcttgactcagatggtcgaaagaaaaactctttcagttatttgatatttgggaaccctccaggagaccataacttatttttgagggaggctccttctctccctttgctgggaacacacacacacacacacacacacacacacacacacacacacacacacacacacacacagctgtacaccatggtggttcaggctgcagtggctccgaatagatcccaaagacttttactgaaaattccttatggatctctgagaaggcgcagcgttgaaagggtaagctacgtggcgggttgtttgcttctcagttgctccaaagacaggaagatgtttgttttcattgtataccgcgttacttctgttactcacgtttcctgaacagttggagttcctgggactgtagaatactatctcatctgtaattttagttttttaacagataatgatgagaaacctgaaacagtaatttttgtaacttgtggatctcagatgggggaggggtgctcttagagatgaaatatgagggaaaagattgggatggaaacttccccctggaatgggtttgaaagatttgagtgcttgctgagaaatgcatgggggctgtgaaaatgatttcttctgtgtttactgaaacatactcattagagcagcagggctgtgaatttcttctactgggtgacagtgtctaaaagggaggtgatggtgatgttaaggagcttcaaagctttggcagtttaaattatgcaggcagttgattacatgcttttttccccccaaatacattgctatcatttggggtttatttgtttttaatgctatggattttggcttaaaattactctgttaatttcctgaaagcatgtttactttatggaagcccctagtagagaaaatcctataaagtaataataaggatttgtccttctctggagtaacagatgcatttttggggctgactctagttaatgcaaagctggttgtcattagggtgacaggctcaacatgcagggagaatccctacacccacaaagtatatggtggttctgttggtctcagaaaccccaaaagcccatgtttgaattgtggcaagtccttccatgagttttcgtcacctacatagacgtcttcagttaaggtgtagtccaagacctaataaagcaaatagcatcacatgaagctctcttgttagatcagctatccgcagcatcttataaagaagatcagaactgaattcaagtgactttttctggttggtataacttactactcagcgatgttttatttaaaaaaaaaaactaaaggtttaaaaatgtgaggggctaactaaatacttaggtcgggttgatttcctgagttttgatgagttacattttttctgccatttgaataatgaaaaaaacgttgctttctattctggttgtgtgtcggtctttattttgagacttatttcttgttctgaatgtcaagatcatcaactaatatgtattaaatgcttactgtgtatttcatgttattccaatagcttagatcttaggccatcagtgacagcaaaatttacacattgatcaggctgctattgagtgtgatgttaggtgttagtgaaaactctttggtctgtatggtaacaaaatttttatcacgtgttctattattaagatatttattcacaaatgctaacatggaagtgtgaattgtgtgccttagggctgtgtgaatggccacattgagcacatagtcttcctttatagacgcgcacacacacacacacaaatccagtcgcctggaaacctccatttataccattatgttctccagataaagtgtttaataaatcatgtatgtttgcataaattcaaatataggcagttaccacttctgttagtcattgtttactaatttaagaaaaattgacaatatgggaatatagtatcatacacaaaacatgtctgttattgggtatgtttgcacacacttgccttcaaagcacacagggctattttctgcccttgagcacaccccaccgttacatgggccttaacatgagtatggtctgaatggtttggggccctcccgcgctgcacatccttggaacattgggtcttccccgtgaaggtgaggtagcacctcaccctccacagcaatggagagtggaactaattgaaatgtatgatgtcctgtcaattccactggacatctaacactgtgggtcagaggaattgacaattctgtgacaattttcagaatggagtcctgtgtttatagaagaggaggagaggtaagggcaaacactgagagccagcacccttccattgggagtgtaaagcaatagcagtttgttcagttccatcagcggctctaagggcgccaggcatttgagttggtttccattgtctcacagcatctaatgacgcggaagaccttacatttctgtaaggctttcagttcattcccctgctttaccattgcgagtcactaacaaggcacagagcccaggggttactacccttgtcctgtataaacagggaaaccaaggcgtggagagttttaatcttctttatgggaatatacagtcaatgacagagcaggacctaaatccagggacctggcattgtatgttcttgccataggatcatgtttcgtgtttgctctctggaggagcgatggcatggcagcctggccctgagaaaagggttataaccaactcgttacctgtgttcacattaaaggaaatatagaagatatgccattaagaggtggtgaaaaccaaagagaagaacatgatttccaggacactgacagtcctgtccccttaggtgcccaggttcgacaattgcttctgtatccaactgctagaggttgagttgaaagaaggaactgcaacttcttaaccctgcaacttagacatccaccaaatcctgagagaccaggcttagttctggttcatgcttcttcagactgccaagagcccgtcactgtgctagggagggtggaaaacataaaggaaatataaaatggactgggtgtgatggctcacacctgtaatcccagcactttgggagaccgagctggtcggatcacgaggtcaggagatggagaccatcctggccaacatggtgaaaccctgtctgtactaaaatacaaaaaaattagccaggcatggtggtatgcgcttataatcccagctactcaggaggctgtggcaggggaatcgcttgaacctgggaggtggaggttgctgtgagccaagatggagccactgcactcgagcctggtgacagagaaagactcaggtctcaaaaaaaaaagaaagaaagaaagaaagaaagaaatataaaatgccacgtttggtatgggaggagagattaggcctgtaaagtttatataaataaaacaattagaagtcagtataatacaggctagaattaagctacaaaataagtaacaaagacaatttaggtgctacagaaagcagcagggtggggtgacaagagtgaggcttgtctatttgctatttacgagttttactatttactctttaactattgaatatttacgagtcatatggccttgatagagtgactcaaactttctcagcttcggtttattcatccacactgcccacccctttgcagtgcttgtaaaggatcaccaaaaatgtatgcaaggacgtaacacaatacctggcaatcatataaaatgtagtccataatgataggcatcatttttaagattgcctgtctttgtgtataagaacatttggcttgtatctttttttttctgtttgtttttttcttgagacagagtctcgctgtgttgcccgggctggagttcagtggcacgatcttggctcactgcaacctccacctcctgggttcaagtgattctcctgcctcagcctccagagcaactggtattacaggcatgcgccaccacacttggataattttatatttttagtagagacggggtttcaccatgttggccaggctggtctcgaactcctgacctcaggtgatccacctgccttggcctcccaaagtgctgagattataggcgtgagccaccgcacccagtcttgtatttttaataaacagatgacaattttttatatttagacacacctccctgtctcctggggagatcctttagggctattcgcttgctaaagccaagacaagcagtatattgtgtcgtggtgataacttttctgggactcccaattttatgtaagacacgtggaaaacaaaatttttctaactgactacacgtgaatcccaagtaactcaacttactcaagcccacatccttctgtatggtctcttccttctaaagccagatggtttttattccagaagtaaagtaaaaatgaacttcatggaaaattctaataaatgtaagaacaaaacatataaatgagttaaggaaagagaaaatgtggaaattttttcctgggcgtttgccttggggcagggaggaagtttttattaaactgctataactttgcaatacgaggaaatggttttatgttggagattacctttatagatgcaaagcctaagaatgagtgagtgaaccttttatgtggcccaccccatgttgtcttagtttgtggttttaagtggaggtgaaatctgctaggcttctgtctgtattctctgctgtagtttgggctccaggaagctgagaaatgtatatttcttcacaccctgagatgcccgcctatgagggctctgacccagtcgtgcaaatacttacagagttgctgtatctccgttttcacccactgattttccagctgtaagatcacctgttgaagtgggagcataatttcctgcatttactggattgctcgtctgccccgttgacttatcatctctaatatccacacccacagacccccaagctggactggacatcactgttctcttgaacatctcaacacctcaaatccagcatgtccacgatgaacttcgtcatctctcctaataatcctgcttctcctccaacacccccagcttcctaaaacccaaactagaccctggcgtcttcctgcctcctctctttccatcgtctccttctcacagccacaaggcactgtccattccagctctgaaacgtctctccccgtcctgctcctctattccgtggtgcagcccgccaccatctcttgcctgcgtgttgccttctcgccgtggccagtcttgctcccctcaattcacgctctgtgctgcagccactgtgctctttctaaaaccgaggggtgattgtgtcactcgtctactgaaacccttaagtggctccctgcctcaggataaggacaaatcacaaggcctttcctaatcacagccctccagcctcacctcttcccatgctttaccctgggaatgttatattccaaccatgcgtggacatgtttgctgttcctccaaactacggagcttgctcttgccccaggaactttgcgtgtgttttcatcttcctggcaatttctgcctcctccctccaccccctttacttctttcagcctaaagccaattccacaggaagctcttccaggcaccccatcccttccccaagtctgagtaaatgctctccctgctggctcccgtagtactctaggatccctttacaatagcacaaatcacactgcattgaaaccactggtttgcttcagtcataatcctccgtacgatggcaggcatcttgaggacagggaacacccctgggttcctggttcataacaggagtgcaataaatatccactagatgacagaatgaatgaaatctaaaagttcatataaactgtcagtgagcaaattcgagaagaggatcagaattaagacctacactggaacagcctccatcctcgtgctaacctaccacaagtcccattatctctggtggaaaatgtgttcactcttacgtgtcagtacaagcggagaaagcgaaatgctcttttcttatttattcggaactctaagaccatgctgtacatctttaagtggaacaaagttaatgcatgaacagccaatcagactcaaatcatagatctcttcacaaagtagtacaaatctgatgattttattgggggaaaaatgagacaagaaagcattctcttttatcacaattattccaatactttaggtgaaagggtttttgtgtgtctgggaaagactgaaatggtgggatatttctggagcgatatttttaacacagcataaattaaacgtttttgtacccacatcattcattatatgatgtgttattccaggttgacgtcttgccagtctattattttgcaaaccattacattatcacagctgctaagctgcataacttaagaattcggaatacaacagagtctctatcgttgagtgtgtgctgcttacattctgaatgtattcatgcagggaagtgtgagacgttaccaaaaacacatacagcagacggctttcagtggatatttattaccattgagcgcaggcagccaagaactgttcagacagatcagtgtattcacacatattattagccagccccctcatcctgcatggggttttgttccttctataaatatacgcctctctggagaaaaagaacacagactactggggactccaattctctggttcatagaatgcattgaaggccattttccctgcattggttaggcccgtgcaattttaagtgacccaaacttggtgaaccgatatttattttgttttgtatagcagcttatgtcatgttaagccattgacttctcatcttgggtagaatgacattgcttattggctcagtgtggggaaggaaaggctgtctctatgggtaccactccagagttttcattcctcaagctggtgtggaaagcaggattgcaaatatctatgcaaatggtcaggactcccaggcgtttcagcatcctatgcaaaatggcagctctcaggctgggcctgaaactgagctatggttctcttctttgaatagcttgtcccctcgtcatgcctcgccatcatgccatgggtcatgttaaaacaatgcttttcaactttggtgttgcattggaaacactcaaggagcttttaagaacccatctgtaccccagactatgtacatcagaatctctggggataggatccaggcatcagtatttaaatccccaggtgattccaacctgcagccaacactgagaacagctgccccaaggaaataatattaccaagatcgatgatttgggcaagatgctagcataaggaaaccagctagtttttgtgttttctggtgactttacataaaagagaaataaatgggttggttgggttgggtttttgggtcatgtcattctcaataggggaaaaaaactatttaggctccttgaaagttgggtccatattcctggcacatcctatgcagtgtccagcacattgaggagagtctctggatagttacctgaggccttccgaagtcatagagtctagaattgtgcatgacttccttccaggctatttaagatcaaaaacatccaatctagcttctcctgtatgcttcttttcttgactggtgcatggacaaagtcccttttgtgtgtctttcaatctgccatattgcaaatatgtacacaaagtcaatcgtgttctcaaggagaaaggggacatagctttcttctctttttttttttttttttttttttgaggtggcgtcttgctctgtcacccaggctggagtgcagtggcatgattttagcttactgcaacctcctcttcctgggttcaggtggttctcctgcctcagcctcctgagtggctgacaataaaggcatccatcatcatgcctggctaatttttgtatttttagtagagacagggtttcaccaggttggccaggctggtcttgaactcctgacctcaagtgatccacccgctttagcctcccaaactgctggaattacaggtgtgagccaccacacctgccccgggggaaatggctttctttaaatgctttgaaacagatctcttagaaactgctctaacataatgaatattatccacctgtgtaatataagactttctttgaacacatagttgaaaacaatccacttttatttgtatttactcatcaatgagcctcagaggataatattatctatcctacatccataaaactatatagaagaaactgtgcaatggatctttattctaatctgggagtggatgaaccacatctacggatttttaattcttttttgtcttctcttattggccactcaataactaatacttcaaaggacttggtcagtttttctactaggtctcagagcctacaacaatacctgggataaagataggataaacaagtgtttattgagtgaatgctgactacctgaacaaaaagaatacctttgtggttataaactcaagcctttaataaaacagaattgtccttcaagggccagggttgcagtgtgcctgtgcttgtatgcagacgaacatccgtgtcatcaccagtcctaacagtgacttattttaagatgctagctcttcttggtggagaacttgatcatgaaaaacttcctaaaatcctactacacaattaacacctttgggtgcatgggcagtcccttttcttcccaatcacaacccttgtggggatattttgagatagtacagaaatatccttctgatcattttcctacattacttgctaacttttctcaaaaacgctataggcttccaagcctgactggctttcctcattaacattcccatagagtgattggagggattggagggatcattcagacacaatttctccaatcactctattggaacattaatgaggaaaaccaataagggttagaagtatattgatcattgctagaaaatgcggtcctagtccaaccacacagaatcagtcccagaatacagatatccctgggaatggaatacctaggacctaacattttatttattaatttcacagatatttatttaacatcgactacatgccagacagtgttctaggcccaagagacacagctaagtctgcgctttcgtgaattggtagtacgtcaagtggtgatgagttctctaaagagaaataaagcagagtaaggagcagggggagacggagcgtgcagcatggttatataatgtggctctcaaggaaggacagggagggagatgggagcaagccacacagccatgtggggaaagaacatcccacacagagggcacagcaagtacaacaggccagaggcaggagtgggcttgatgtacttgagggatggcaagcaggtagctggagcagagtgaaggggtgagatgggggtggtcagaagtgaggttaaagagtcagagaagagttaggagcccagctggcacaggctgtgcaggccatgagaaggacctttgggttttactctgggtaagactgaaaaagatcaggggatcaggggctgaaagatgacgttagctactaggttgatagagaagaaggctggaatcagggtgttgcatgaggttactagtacaatcatcttagtgacagatgatgatgatttaggccagcggataccctggaggtggtgagaagtgaatggactctgaatttatctagaagggagagctggcaggatttcctgacagattgggtgtggagggagaaaggaagacaggagtcaagaacggccccctgagcagctgtagactgcagctgacgcttaccaagatgggaaccactgcaggaagagctggtcagtgatgacagcctgggcgggagagactgggttctattcgtgatgtgctaaacttgagataatgagtaaaaattcaaatggagatatacagtaggatgttaaaaacatatgttttctctttgggtgagaggtctgtattggagataagatgtggacattatcaggggttcactggagctggcttgagaggctctccagagccaattatgtgatttcttctcaactctacattcagtgatgacagatgagcagtttgaaatgggccatggcagggaatttacaccatggaaattggcaaacattacaaagcagggcttttattcccctagagagttgataagagttacacattctccagtataccactggagattggcatttaaagctagaggactatatgataacatctggggaatgtgtgtggatggaaagaaaattgtcagcacactggacctgaagccactccaaagcttagagatgggctccatgtggtggaaccagcactggagatgagcagagagcagccagtgaggtagaaagaggatcccagaagggcatgatggattttcaaatgctgctgatagtcaagtgagataaggactaagaaatcaccttattgcagcattgtcataaaagattgcacaaattgcatgcatcaaaattgctttgtgttggccgggcttagtggctgtaatcccagcactttgggaggtagaggtgagcagatcacttgaggtcaggagttttgagaacaaactgggcaacatggcaaaaccccatctctacaaacaaattagctgggtgtggtggcactcacatgtagtcccagctactctgggggctgagatggaaggcttgtttgaacccaagaggtcgaggctgcagtgagccaagattacatcactgcaatccagcctgggtgacagaataagatattatctcaaaaaaaaaaaaaaaagaaaagaaaagaaaagaattgccatgtgtttctaagtacagtacatggatcagatgcctggtctccacctcagacatcctgaacctaatgctcatgggcatataacagagaagacagtttgagaagcagtgccttaatatatagtgttccagaaaaacaggcacagtggggtagagaaaagaacacagcagaggaagtgatgaataatgcagatgggaaaagagagaaactcttagaacaatttttactcaccctaaggtcagtcctggacacagagagcaattagagaccatggtagagactcttggggtgaagattattacaactaaggccaagagtgagttttctccctatagcaccaaagaaacagcatgttcctcttttaaatatccctcccttcagccactatgtcagaaaaatggagctgcaattgtcccttaggtcttttccagcttccacaacccatgcaaaaaaaaaggcaagagagaagatgaaagaccaatttcagtatcatctactggtcacctatgtcaaaagccagcactctacccctaagtcttaggtgtcctaagatctagcagagggaaaacctgttttgttttgttttgttttgcctcaatttttttcaatggcttgatgtaatcatgggtcagggcttcataacccagctgagtcccagaatagatttagaaagtataatttaggctggagccagccatcaactgcccgaaatgagcaagtcctaatttgaactccgaatttggggatcgacatctattctgtaaaagcaaatggatttggatcaaattggaagaaatcacttctaagatctcgtggagttcttgtagaagaaaatcctgctattatctgccaattagggtgaaggaaagtaagtaacaggtgccaacactaggaaggaagtcttccgtgtagatcctatccagagaaggctttctatgtgggattcacccagttacattatgcctagttccccttccccagcccctttaattttcctttaagtaagacggtacccctgacacatgaaattcataccactgaaagagaagtttaagaagcaggcaagtggtacaggagccctcccacgagtctgtgccgattcttgtgaatttgcctattttgttaccaaagtgaaatttatgtgcctgggtgtagatgagcagagtcatcagggctctgcaaaagctgttcctgtgcaggggcagtgacagccttgctttgtcactggcctggtgcataggtgccgggtccacccatgtaggcagcagtgcaggtgtcaggttctggaatcactgtcattaagatgtgaatcccatatgctatggtctgaatgtttttgttcctctgcaattaatatattgaaatcctatcccctaaagtaatggcattaagagatggggcctttgggagacagttagtgcccttataaaagaggccctcaaaagctcagtagtcccttccaccatgtgaggacacaggaagaaagttttgcttgtaagccagaaagtgagtgctccccaggcaccgaatctgccttaatattagactttccagcttccagaactatgagcaataaacttctgttgtttgtaagctccccagtttatgggatttgttatagcagcatggagaggctaagatgccatccttaaagggaggacgaggagagggcgcttcctcccctgctgagccccagctctgggttgtcaagtagcagagcatttagggagaggagctcattaagaaaaaaaaaaaaaaagcagtctggaaatgcatacgggcacttgtcgatttgaaatcaacaacgtagaatggtgtgcttatgtcagcctactggtcaacttggcttcctgaagaccaattgtcaacgagcagaacctcagctcccaaggccacatgccgtgccatttgacattactctcggggcaatacctagatcctatggcttttggttcagccatagcgtccatctgcagatcatcttgtgtttgtctgagacagagtcttgctctgttgcccaggctggagtgcagtggcacaatctcagctcactgcaacccccacctcccacgttctagtgattcttgtgcctcagcctcccaagcagctgggattacaggcatgcaccaccacacctagttaatttttgtatttttagtagagacagggtttcattatgttggccaggctggtctcaaaactcttggcctcaagcaatccacctgcctaggcctcccaaagtgctgggattacaggtgtgatccaccacgcccagcccagatcatcttactcgccctttatttctagtagaatctctggttgggtgttctgtgttctccttgatggtattaaaccaacatacctaagagcaaacaaaaatatcttcgggactctgtgacttccttttttcttctgtcaatggccttaaggtggcataagagaaacatgtctcatgtatcttagagtggggcccatgcagtacaagaaaacttctgtccttaagagatccagtggtcagaaactggctaggtttgagagttggtttctatctcagatggtacacataagacctaatcctttatcttaactcctgtggctgcgctcctgttcactctagtcacctgagaaaatacaacctcgtagaggcattataaactcaaatatgtgtcaaagccaggcagggaagaaatgtagcaggaaaatacagaaagaggcacattgcaacctggaaaactcctgccccagcaggtgaggccagctactactcagctgtgccacgggaaaaccagggccggtgttcctggatcttctaactttacaaaagaaaatgtatgtatgcgttgttcttatatttaaggaaaaaatacatatgtctgtatgtgtgtatgtgagagaggaacagagtgagagatatgaaatatctctatttttataatccaactttaaagaataacattgcctaagatgccagttttcaatttctacaagtaaaagagcactgtcctgaggcaggcagatgatctgaagtcaggagtttgagaccagcctgaccaacatggtgaaaccgtgtctctacgaaagtacaaaacttagctgggcattagccaggcatggtggcttacacctgtaatcccagtactttgggaggccgaggcaggcagatcatgaggtcgggagatcgagaccatcctggccaacatggtgaaaccccatctctactaaaatacaaaaattagctgagtgtggtggggcacgcctgtagtcccagctactcgggaggctgaggcaggggaattgcttgaacccgggaggaagagattgcagtgagccaatatcacaccactgcactccagcctggtgacagaatgagactgtctcaaaaaaaaaaaaaaaaaaaaaaaaattagctgggcgtggtggcacactcctgtcatcccagctactcgggaggctgagacagcagaatcgctgaacccgggaggtgaaggttgcagtgagccaagatcgcatcactgcactccagcctgggcaacgaagcaaggctccatctcaaaaaaaaaaaaaaggactgtcccaccctaaatatctacatattctcccctgccccaggcttgattttcataaaaaggaaacatcttgctacaaaaaaaactaatcttaaaatagatcctcaggccctccagctgcagcataatcctagtgctaaatcagaatatatattttttttaaaaaaaaacctattctgacaggtcaaatgcaaattttaaaatatatttgaatacattgaatacacgtcctccagctagaggaaacaggaagatgacatcctctttgctgagaacatggttttattacctagcaataggacaacaacttcagaagcaactgaacctctggtctaattattgcctgatagaacaacttattaatatcatcagcaacagttttttgttttgggaagatattctccattgatggtgttaaaacagaacaaatcaagcaatttcagccaatagaacaatcaccctaccacctagaggtatattttgctaactcaaatttgcagaccagcagtgtgtggtcctacttaaaactagagattgcacaagagccaaacagaggttcttttatgatcaaggtggctgactggtaacagctggactaaaacctttcagttctaaatcatctctttcatgctagatggagtggaattctggggtcccagccaagtccttgagcaagaacttgaatggattcacagctccttttctgatggaaacgttggctaaaccctgaggaactctggatctcaccacgatgtcaaatagaatgatgtccctgctgggggaggaggcaagtcaggcttctccattgtcccttctaaacagcagctcacacttgtcacatccacagcagagatgcaactcttcagttttaaactcaggatgtcctcactgtctcttgccggataaggcaactttgaattcactaccttctagcacttagcccaaagttttgtagggacataggacacgcaagagaagcagatcaatggatatgttggctagtcattactttaatctctttacactaaatcctttttttttttttttttttttttttttgagacagagtctcactctattgcccaggctggagtgcaatggcacaatcttggcacactgcaacctctgccaccgggggtcaagcgatcctcctgcctcagcctcccaagtagctgggattacaggcatgcgccaccatgcctggctaatttttgtatttttagtagagacagggtttcaccatttggtcaagctggtcttgaactcctgacctcaggtgatccgcgtgtcttggcctcccaaagtgctgggattacaggtgcgagccaccatgcctggcctacactagatctttattaaattaaataatcaaatatcaacatagttatgctgtattttctcaactccctgctgaaattattttacaaagttaagatttaattcctctctattgagggctgatgtttagtgtcattttgttttgaatgagcagcaacctattcttggcctggactggggctggccatgtgacccgagacttaggcaggacatggaggtgggtgggcaggacccaaggccaggcatgggagtttgctggggtcagtgagcctgcaagccaacccacagacaggctaaagactcatgaatccggttagatgtgtcaaatatagctggagaatcaagaaacaggtggagaccagagaaatcagaggagaagaaaccaatttaaagcaaaggtagaagcaagtgtttgtagaaaccccttgaaccactggcatagctccaggcatgtctaggcatagcctgggctataggcagagatgaggtggttaggatggtatcttagtatcatcttgctgagaaagccagcagaagaaacatctataagcacgcttctgaggctttttcaaaatgaccattgaagatcttgttccttatgttattcagtgctttttatatattccactccgttaattccttttagaagataataagaagtatgtgattcaatgtacttacctttttacctttgctgccaggaaactcaagctaaagttgaggcacaacctcagtaacttgctcattctggatgtcttttcatacttttaacttattgttttcttctttttttctattttagattacccttaattttctagtttaccctcatattccatgtaaatatgtgcacatattttgtgcctttgccaagcagcatggaatcctataaccttctcttctgtgtgtgttactttctgtaagggaaaccaacacaatggaaacgtagcccattgagagtaaaaaatagaacaaagtatgctacttcccttctcttggcagaacgcattgtcccaacaggtgtatcaaaaatgcttcaaggtaagccaagacatgggaacattgtgctctgagcaaggtggttcttttttcccagaagggaatgaattcatttggaatgttaggccctgacagaacagagccactccattccactccattgtgtcctgggagtacacagggacttggtgcagcccctagaggcagtggcagtttacaggcattcctgggaagaacagagggggtcccgttggaggaaagcaggtgcacactgtcctgaatctccgcgcctgatgcccaccttcatacaagctgcagctatgcctgggggatgacagttctgcagagtccaaactcacaaggataagggctggaaaagaggctttgctggttttctgttcccaccaggatgttggaagcctcctttttgtccttttcactctacgcttcttttttcttttcctttctaaatgttgctgtcagtgtactcagctgaatgctatcagatacacaaataacaatagcttcctgggaacgatttgctgctgtgggtcatgggccagtgccaagaagcccaggcacgccaagcacagtgttttaggaaaaccgcggctttcagagagcagcttcaggataattgttcaattccattagggattctggctccgaatgcacctcggaacctggccccagtgtctcctccaggggaacttagaggtcccccactccataccttggctggctttctttttgatttgtttaattttcaagaaccatcattactggaatctcgtatctgattgcggtgttcatggaaagaaaaatgggaacaagggctgagagacagtgaggcttccagggtgatcaggttgactcgcagagggagaaataacagattcccaaatgcggattctggcacttacacgtttctgagtttccgatctggagatcggagaggtcaccgtcctagggcttgtcagcctcgccagcctgctggggctcccattgttctgctcagagtccaggaagcagatcctgctccctgatgacagcttcaggccgagatgttcctgcaatggaaggtttcccgggcaggctttgcttccatcctggagagagttaaccaggtcagccagggtcaaggagcagatatcaagttacatattttcctccctcatttcctagcacactcccagacatgctccacaaggaaggccaggaaggaagcatacccgcccaacagacaagacaggccaggaccctggaaagaagaggaaggcacgtctctgggccttctcagtccttacttcctcctccctccttgtcccacattcccctctggatgggtctcactctccaagaaaatggccaggagcaaatccaggcagagagggaagttactgagacccagaagcacagccaagaatagaaagtacctttaatgagctctttctatgtgcttaatctatgcagctgttttctcctctgatcctcagagcagccctttgaggttggctcttattcctaaccccactttctagaataggaaaacagagaatagagagagattaagtcatttgtccagggttacgcagccagcagtggcagatccagggtttgaacccaggtagtctgacttcagaaaactctccagagcgaatctaaatgggggtctaacctagagtgagacccttggaatccaagctgctgagaaaagtgtccctttagaaaggaactctaggtctggttgccagattcagcaaatgaaaatacaggatgcccagttacatcaaatttcaataaacaatgaatcattctttcatctaagcatgttccatggagtttgtctgaaattcaaatgtaactgggtgtcctgtattttatctggcaactcttaactatagggccactcccatctctctgccctctgtcttgtcttcctctcatcatcaataggctgtctccctgcttccatttcccctctgatgcccatctctggaacaactgagctgtacctgtccatgtattcttatttaaaatcaattattggctgggcgcgttggctcacgcctctaatcccagcactttgggaggccaaggtgggtggatcacgaggtcaagagattgagatcttcttggccaacatggtgaaaccccatctctactaaaaatacaaaaattagttgggcgtggtgggaggctgagtcaggagaatcgcttgaacccgggaggcggaagttgcagtgagccaagatggcgccactacactccagcctggcgacagagcgaggcgccgtctcaaaaaaaagaaaaaaaaatcaattactaatgatcatctaatatcacctgagcatccataatatgccagggcttctttgttcagaagaatcaacatggtagcctctgggctggtaggtgttagggtgcaacataatcaaaaacaccaggacccctgatacccactcagaagcaggagccactaccgctaagacgcagtgtgggatgggaggtgccactagggggctggaagactgagacccccctcacccctggtcaaccagagctctgcttctaagatatttcttatgtccccaccaaatatttcatttgggaaaagatttccataattgacaaaaaaaaaaagttactgaaaatcactgtcctaaagcacaccttctcaagcgtcagtttataatggaatcatctgggggttttactaaatgcagatgcagtctgcattcctccaagttcccgtgtagttgctgaggctggagcctataaagggcattttgaggtcgaggatctaaagtatcctctctgacgtccatgctcataggttatttttctttttcatctttgtttcaggtaggtaggtaggtaggtagatagatagatagacggatggataggcagatagatctctatagaaatctacatagagatctctctgttcatccatctatctatccatccatctgttcaactatagagacctatctatctatcgatctatcggtatctatccatcggtatctatccaccaattcatccatccatgtacccatccattcatctatctatgtatatatgtagatatctgtctatccatccatccatccattaattatctttcccacagctattttatgcaaacacttagacaaaattagtagtgactgtacaacccactcaaagagaaacaaaatcctcctggtggaggtgatcataagagagaaaggaagggactaaacacattgaaatgtccctgtctgaaagcattcctttcttgggcactggggatacttaaaaatacaatccactctaaaaggatctcttcctctgtgacatcctaccaaggtcgaagagtccactatgagaatttcacatttgccaaattgcgaagtcctacagacctgagcagtcctgggccttaaaaactctgtaactcctacatgaccaaatgggagtctttacggttgtgtataatactaaagaagtgttctgcatggatacgaggcatattgtagcctttagatatgaagtacattattttcactcctctgttttgtgtaactattaaataagtgggcctgagacactgcttttgcctactgtctgatcagattttttttattttctagcgtatatcaaatgtgcttgtttctgttaaattgagagtcccctcttttaaaaaagaaaaactgaagtgtttattttttggccacgatgacattgagtgctcctggtttggagtgatttattttttctcttcctttacagctgtgacctagttaattgtaggtaggaagcaaactctgaaatcattagaccttctgctttgcttagaaatcttgttctgttaaattgtacgatgtcctctttaataacaggaagtcaggtctcagaatcagcaacatttgtgttctttgtgcatcgagttaaagaaaagtaagtgtgtcccctgcagtttcctcgtggtcggggaagagagacggatgagtaaatgacccatggatgagtcactcatttctataacgagtcaaaatgctctgttggccgcaggttgtaacctctgaatattctagtctcccatccagagacaaaggagggagtgatcagggtctcagcttggctgcttggttcctgacgttgggcgaactcaagtactgaaatatcacatcattaagaaatgactttaatgtagaaataaatgcatgttactaatattcaggcttttcaagtctgtaagtgggccctcatggtggaaggagacatcctgttactttaaacaaaatatttcttttcacgatttaactttttcatgggaggggtgggaaaaagttgggtggaagtttcttaagagtcgattttccattctgcatatgggggaaggatcgtttattaactccttccatgggccagttgctctgctggggtttctatcccacgatagttcagaggtaaagtggcagatctttcgaagccatgtgaaaatatgaagctgtaaacattaagtacagtgacggacacagcttgcttctatttctctcaatcaccctaagtccaagaactaaggttgagctacgagcctagatctatgagatctgtgagatctgagggcctagatctatggctctcaaagtgtagtcacatagccagaacatcagcctctcctggtaacctgtttgaaatgcaaattcccaggccctacagacatgtttttccatgccctgcaggtgattctcatacaggtatgagaaccactgaccgaaacccttaggttccattgtgaattgaagaactcatctgcaagccaccaagacctggtgatctaggggtctacagcagtggttcttctccttggctgtaccctagaaaccctgagatgcttctcaaaaataacaatactgagtccctcccccagaccaataaaatcagaatctctaggagcggggtgcagggaaaagcttttcttttttttttttccttatatttattttatttatttatttatttttattattattgttatactttaagttttagggtacatgtgcacaatgtgcaggttagttacatatgtatacatgtgccatgctggtgtgctgcacccattaactcgtcatttagcattaggtatatctcctaatgctatccctcccccctccccccaccccacaacagttcccagagtgtgatgttccccttcctgtgtccatgtgttctcattgttcaattcccatctatgagtgagaacatttagcgtttggttttttgtccttgtgatagtttactgagaatgatgatttccaatttcatccatgtccctacaaaggacatgaactcatcattttttatggctgcatagtattccatggtgtatatgtgccacattttcttaatccagtctatcattgttggacatttgggttggttccaagtctttgctattgtgaatagtgccgcaataaacatactttcttaaaacttcccaggggacccccatgggcagccagggctgacaccctgggaccacaggaagggaggacccaggtgggagagggttgctgccgtggctgtaatgtctatgcctgtggaagggagcctgcagtcattgtgcagaatccaagcagcccctagaaactctcagttctagacaacagagatgaccaaagccacgggtggctgcagtgtcgggacagtggggctggggaggggcttcgtttggagccagttggtgctgtcctgccagattgcaccttctcatccctcccagctgcaggtgtgaaaagctgccagcctgctcagttcctaaatcagcatcgccagggctggcagacttctagagggcggctgtacgctagtgagcagtgtaaacctgctctaaagcttgtgtcaaaggcttaggatgggccaggggccctcctgtgccctaggctgtggttgtttcttcccaaacccaggccaacccagtgggcttatgccctcagcctggacctgttctctgctttcccgtggagactggtgcctgccagggctgcgacatggttccatggctggcttttgctaaccctgctcccagctcagggcccttcttcacatctaaaaggatcctattctctctccggcatcccaaccttagcatatgcctggctttccaggctcttaggcctgacctgaactcacacccactccctgaagactacctacattcaaggagatttaaatgagtctagagccagaatcagcctgtagccaccaacccctcaaaccacccaaggccagtgggaggtgctcagcaggcgtcctccattccagcctccttccctgtcccatggtcctgagtagagagaccagctgaccttaccaccaaggctccagggtcccagtgagcagatcagccagccccaagtatgcaggaggagggacacccgagggcgaggctggggcctaggggccaaacacgtgagccggacttcagagctaagctcccactccagcccggaatgcgaaggcaaaccaagcagacggaggaaaggtcagggtgagccagccaccttgggagtcaaaggagcacagggttacctgaagcccacaccagcagggctcatgaggctaagccactcctagatgtcagcaggcatgtctgtgggcagcgtccctgcctgcttcaggagtggagcaagcgctgcctgtggcagaaatagtaggtgggaaagatcagtatctaacagcacagagcttcccccaaattacacacaggattgccatgggatccagcagtctcactcctgggtaaatccccaaaggaatgggaagcagggacttggggagatatttacacactcttagtcacagcaacgtgagtcacagtagccaaaaagtggaaacaacccaagtgcccgctgatggatgaatgtggtctctccatacaatggaacattactcagccttaaaaaggaagcgaattctgacacatgctacaccacggatgaaccctgagcaccttatgctgagtgaaataagccagtcacaaaaaaacaaataatatgtttcctcttatacgagctacgaagaattgtcaaaccgacagggacagaaagcaaaacagagttaccagaagatggagaggggaggaataggaagttactgtttaatgggtacagaggtcggttttgcaatctgaaaaacttctggagatggctgcacaacgctgtgaatatacttaatgccactgaacggcacatttaaaaatggttaaaattgtaaagtttgtattacgtatattttaccacaataaaaataggtcagtatctggaactgaaagggttgggggttggatgcccacaggtaggtgcttccatccatcacacatgaaatgaggaaggggctgttcacctggccacaaggggaaacttcacccctgggctctggacacacgttcgacttcataaaaccccgccatgtgggctgctctggttttaacgctttgaaatctgtcctgggttttgctgaaggagctggcgtgccccctgcagaaagcaccccaggccacttcaccgtggtcagactcaggaaggggccctcagacttgcccctcatcagtggctcactaccgagacccctagttccagctgagtgaggagccgtggttcccagttgttttttttttgagacagagtctccttctgccacccaggctggagtacagtggcgcagtctcggctcactgcaacctctgcctcccaggttcaagcgattctcctgccgcagcctcccgagtagctgggattataggtgcccgccatcatgcccggctatttttgtttttttttttagtagagacgaggtttcaccacattggcgaatttggtctcgaactcctgacctaaggtgatccgcctgcctcggcctcccaaagagctgggattacaggcatgagccaccgcgcccggcccccagtttattaagaaacattaacagatctaacagatggctctcacctcctaggtatctcctggtctctgaattctaaatcaccacttttgtttctgcaacaagagggaaataaccaatacctcaaaccaatttccttcttctctagggaattatattttagtataatttacctcaaattatactacccagaaacatttttctggaaaaaaatatatatatattctgggtttttttgatgactcgaacaatcaagtctaagctcattgtccttatagattttcaatgccttcatggcctaggaggatgtaattacgttttttttctattgaagcgttaaagggcattgctcttctttgcatcggtcatttcccagctcctggcttgtcaatttcacggttgcctcggctcaggggaggatgaactttgctttattgcaaatgaggaagaggactgcttgcaaatttaggaacacattgagccttgggttaagtaaatatttcacttatatgggacacttggcctctgtcagaaattggcgaccagcctggccgacatggtgaaacctcatctccactaaaaatacaaaaattagcctggtgtagtggcacacgcctatagccccagctagttgggaggccgaggcaggagaatccagaatcacttgaaccaggaggcagaagttgcagtgagccgagatcttcccactgcacgacagagccagacctcatctcaaaaaaagaaaaaagaaattaaaagaaagaaattgacaggacaaagaggacctgcaaatagagggacttcttgttggctgatgcacctgtagggcgaggagaaatctttgcctttgccctcagaaagttcgctgaaaattagctgacaaaatcagtacattcatagaggaaaaggcatacaaatttatttgatcatacttttatgcgacacaggagccttcaaaataaagacccaaagatacaggcaaactgtctatttttatgcttaggttcagtgaagtatgggcagccatgtagataatacaactggacaaaatgtgtctaatggactgagtgggaagacccagtaaggcctgtctgtctagattcttcttggcctctctgagcagcgttccttccttctgggtatagggcaggaccctctctggaatgggggtcttatgacctacagtcaaacaaggtaggtcagaggatcccttccctcccctcccctcccctcccctcccctcccctccccttcccttctcaggctgaagtacagtggtgaaatcacagcttactgtagccttgacctcctgggctcaagtcattctcctacctcagcctctctaagtgttggaattacaggcgcatgccaccgtgcccagctaattttttattttttgcagagatggggtcctcctatgttgcccagggtggcctcgaactcctgggcgcaagtgatcctcctgccttggcctcccaaagtgctgggattacaggcatgagccactatgcccagctgagaatttctttgtgtttagctttaacatagaaagatgtaaaaggggaaatttcaagtgacatttttaggttttatggctggctttgggaaaaaagggttctggtttccagaaaccaccttggggaagagggattctagtttgtatggctacgcctgtgggaggatgaggggccagagacgggaggatcagagatgggaaaaggtcagagagagctgcttctaaggctttcatttttgagtaacattttctgagccccaatacatataatccggcaggtaacctggcctcactttctcctcacctgcacacctacctgcttctacctgcaggtcactggatccccactgggagcttgaccccctgccctaacaggaagaacagaaaattgcagtcacagggagatggagcagtctccagcctgctttggcctcccttttttttttttttttttttttttgacacggagtcttgccctgttgcccaggctggagtgcaatggcgtgatctcggctcactacaacctccgcctccggagttgaaacgattctcctgcctcagcttcctgagtagctgggattacaggcacccaccaccatgcccagctgatttttgtatttgtagtagaggcggggtttcaccacgttggccaggctggtcttgaactcctgatctcatgatccgcctgcctcggcctcccaaagtgctgggattacaggtgtgagccaccgtgcctggcctcccttaagtattctatccaccatagcttgtcctttcatacacctttcagtctgtttgctctcagcatacctagtttctggcctcctggtcgacctaaactctcgattcattattcacagatgctttggttgactgctttaaacccattgattcaccttgacctttaaattctggatggctggttgcctgtgccactgtgctgacttccacaacttccctggacctccaacccatgatagttcttggttttccaagcttcgttaccaaatcataacccatatctaccatcctcagtcaaatacagatcaagaacacaccacactacctacaggtaggctcatttaaattattccaagaagcagagctccaaatgcatatatttttatctacaagagatcttcatgagaaaggccagcctaaattcttcagcagtagtctaggcaactcactaaattaatgagattatcctaaaacaggcctgattttgcatatatcaaaggatttatttttttcttactcacttggagtttgaatataaaagtctgattcattgactaatccaatctccatggaccaactcaagacagatcattcatggcagctttttgttttgttttatttgtgttggatttttctactatcgttggtctgggtgtggtttcatgagaagactttgttaaaataacgaacaatttttttaatttaatttttaaaatatttgatttgatttgatttttacggacagggtctcactctgttgcccaagctggagtgcagtggtgcaatcatagctcactgtagcctctcactcccagggtcaagcaatcctccagcctcagcttcccaagtagctgggacttaggctcccccagctaattattttttatttttgtagagatggggtctttctatgttgcccaggctggtctcgaactcctggcctcaagtgatcttccagcctcagtgtcccaaagcattgggattacagggcataagctgctgtacccagcctatatttttaattttaaccgaccatttatggagtgatcgagatttctttagcaaatatagaaaatgtgatggactagaataaaatagattttttttgtttttaccacagtcatgctggaatgcggagggcttgttggagtcccgactctggactcagtgacactgtgggactgggccctggggagagacagtgctgtggtcagcagagagtctcccagacgggctcttcgaacggccagataccatttacacctctgctttctttttccccttgagaaaagcattctaagaaagaagagaaaaatgcagtctagaaaatggcttccaaaagtcattagtttgccaaaattgcatctgccctccagcagggatgttgaccccacttacattagtgcagcctctccattcccattcatcaggtccccagcattgtgaatgccgtggtgagtgttgttttctttccaaataagaaagggaatggggtgctcatagacccgctcttgagaagccaacatgagaagtacaatggccctgcctgttagagagtttcagctgcaccagggtggattttatgtaggcatggccacctaaaagcagcaagagaagccatagcctgtgttttaacagaacatacatagtttcattcattcagtagtcattacattcccattacactcaagacgctagagattttttaaaaagaaagactgctactttaggaagatgagttttagagagcaaagagactatgagaaatgaatagagcattgaaaactgaaaacccctctaatacctactataaacaatgtaatacccccaacgagtcaagagttcaaaggaatttaagttataggttaaaacaaagtgttcttagctctttttacctcttataaattctacttcacctccttcatatctgaaagagacactgacttgctgctcctcactgagcaatcctccaacctcttcccagcttctagacacacattttctaacctcttaattcctctttggaaaggaagtgttaattatctcccaaacaactctcctatgagcataaagtcagcttaatcgtcctctgcgaaaaggaagtgactctaggcccacctgcccttctctctggggacccctttctcaagcaagcagacctccttttcttatgagcaggacccccactttacaacttcactcccaccaggccccagacctgcatgtaacccctaaacaaaacaaatatgtattttttttcacataaggctttgattacacatatgcatgcttgcgaagtacgtactcaaaaatcatccttgggaaaggatgaatttcgtggaaaccaaataacaggagattaagaaaagagggtctgagggcatttaatttccaactcatggcctggactgatttaattcaggcggctctggttttatttctactggggcctggtgtgcatatggcagcttactttcctaaggggtaattgatagatgacatcacttttatggccataggatcacttgtataatcatgggtggagcttgcggggaatatttctaagcatagctcttggcttgctgcttgggagtgcttaagtcagagggcagctcctgcctctcctgtactttcccagggacccaaaatatttttatatacacagcaaagcatttttaaaaggttattctccagtccccaagatgaacacagtgagtttcctagcatttatataaatgagttttttgggttctcaggttgagaaacgatgatgccatgatgactcttggttggagctgggacgttttccagacccaaatatgggattaaatgtgtgagttagcaatcctgaaatgccttgggatttcaaaagactgtttgggtttgggttttgcatatcacccactcagttagccgtaccagtgctatttctaaatagcatttttttttccaaggaagtggaacccggattagaaaatggcaaatggtaacttccaaaaatatttggacttttgccccatggtgggtgtgagagagtcaggagcagaagaaggaggtatggaggggctgttgagagaggaagaggacattctgggctcttctgtactccagcctcttttccccagattccatctgctgcagcctgctgggggctaaagcatgggggacagcacaccagccccctaaaagcagccctttctgttgctgcctccaccctatcctacccaaaggccacgtcatagaatccagctagaaaaccaagaacaccaccacttaacactaggatggctgtaatcagaaacaagattggcaaggaggtagagaaattggaaccttcacacactgctagtggaaatgtaaaatggtacagctgctttggaaaactgtctggcagttcctcaaatggttcaacaaagaatgaccatctgacccagcaattccactccgaggtatgtgcccaagagacaagaaaaacatacacctcacaaaaatgcttacacaagtgtttatagcagcatcattgatagtagccagagagtgggaacaacccacatgtccatcaactgatgcatggataaacacaacatggtctttccacataatcaaatattattcagcaaagaaaagaaatgtactggcacatgctacaatatggatgaatcttgaaaacattacgctaagtgaaagaagtcagccacaaagaccccattaatataaaatgtccaaaagtggcaaatctatggagacagaaaggagactaaaggctgccagtagctagggggaatgaagagaaatggggaatgacaatgacagctaatgggtgtggttttcttttgggggatgaaaatgttctaaaattagattgtggcaatggttgtagaatcctatgattaaactaagaaaccactgaattgtacattttaaatgactgaagtatacggtatatcaattatatctcaataaggtatttttacgtttttaagagcactgacaaagagtgacaggccaccttcatttaaagaacaaagcttccaacactactgctacccagcattttgattacacatggagattgcttaacggcattcagtggatggaaagaaagaaatttgcagtaaatttaaacctcagtttgagtcttgtgttggaaggcaggaaaggaatgtggcattaaaacaccgattagtagttaagacctggaaaagtccttacgtgacacagaagtagaggacgcctgctcactgctcacaaagcacaaaagaaatctgctttctacaaaaccagaaaatacgaccgatgggcatttctgagtgcatatctgcctttccctctcactcttgtggatttatttattttcctatcaccttctcactttggaataaatcggctattgatcttcttttgttcttccaagagaacagatgtgacttaggctaaggcgttaattccttgaagtttcttgatattaggcctcaactgtactgggctttgctcttggagaaattgtcctttaccttgagatcagatcagtaaaagataacaaaatgcatccaagaaagtctttttaaaaatgctatttgcactagtagctgactttgacctgagatagaatagttcttcagccaatcttatggctgacgtttttacaaacagatagcaataaataatccctgaatgattaagatgggttacattagattgcacttctgaacatatttctttagttgctataaatatacttctccacgtgtatgctgttttctgtgtatttatgtatttgcaaattttgttcataatagcactacacattacttgcaactgagtttttcctattccttttcaaggcagtaattatgtcttaaaacattcccagagccaggcaaaggcatttgttgcttaaaaaaaaaaaaattcctctgtctttacagaagcagtgaacgagggtctgggagccgggatagaaaacacagaaactccgagatagggaagatgattaaccagtgggacggaggtgggagctgcaggggatggggctgggagtccgtacctggcagtcttccctgccatgccaaggtcccacctcctcttctgtcctgtctttgggcaggggaactcctggcatcagcaacacctgcctccctcccaggtcagccactgagttagggctcccagcccaagttcccttccccaatgtgcaatcccaggaccaagacctcagcttctccttgggatgtttccccaggacttacaatagacaaacactcagcaactcaccccatctggccagctaactcaatgcttgactcttttcacccctaatagtagcaaaagtctcatggaaggaggagtgagacagtgactgctccttactctgtcttcctggtgtctaacatggtattccctaccctttagacaccaagaggtcactctgtcctcgtccattaccctttaggttttgcgatcaactgtctaagtggtaaactacctagaagatgcttattttctataattcttgagaaaagaataaggaaagtgatgaagagaggttgggagttagaccggtccaggtcacatgttcacctggtgagccctggtgtcttgctccagcttcgtcacagtgtgcaggaggtctggctggctgcttgcaccatctgtgctgggacctcctctgtaagatgaaggtgtgtacacacacacatagaaacacaagagacagacacatatatagagattcagagagattcacagagacacacagacacacacagagataatgacccccataaaacacacagacacaaacacacatagagattcacacacacatggatagacacacacatagacacacacgagacagacacacacagagattcacagagacagacacagacacacacatagatacacaatgacccacacaaacacacagacacagtacacacatacatagatgcatacacagacacacaatgacacacagacacataatagacaaacagacacacgaatagacatgagacacacatacgcacagacacatatgcacagacacacacacagagacaaagacatatgcagtagacacacacatacacacagacacagacacatacatagaggctcagagataggcacacacacacatacacacacacattaacatatgatagacatatacacagacacagacacatacatagaggctcagagataggcacacacacacatacacacacacattaacatatgatagacatacacacagacacagagactcacaaagacagactcacagacacacagtagacacacacacacaggtacatacatagagactcacagagccaggcacacacacacatacccacaggcacacatggacacacatacacacacagactcagagacacgcacatgcatactcagacacgcacagacacacacatgcactcacacagacacacacacacacacctatagtgaattgctctgaggtttctaaatccctttgaaaagcaagggcattgttctcaatggcagtcatgccacttgcacgcacagcctctcagaggccacgtggggagctgccttgtgaaactctgaattagcgatttaaaggctagggcagagccaggtgcagtggctcacacctgtaatcccagcactttgggagagcgaggcgggtggatcacctgaggtcaagagttcaagactagcctggccaacgtggtgaaaccccatctctactaaaaatacaaaaattagccaggcatggtggcgggtgcctgtaatcccaggtactcgggaggctgaggcaggagaatcacttgaacccaagaggcggaggttgcagcgagctgagattgcatcattgcattccaccctgggcgacagagcgagactccgcctccatcaatcaatcaatcaatcagtcaaggctagggcagaatcatgtagatgattgaagatacaggaccagtgaaatcaggcagcatcctccaacggcactgtcaccccgagcttccatgggcacagagacaggcgtctgctgctggtgtcaccaggctccgattccagactccagagcaagccccactaaagcacgccactcatccccgcaaatggtaaagatatcagggcagcttgagtaggtcttgctgttctcgggaattcttgtttatattcagtcatttttcaaaagagcttattatagcacctttatactcaaaagattcccagaccataagctaaatatatacatttcacttttttaatttttaaagtcactttacttcgtcgtagaataaaacaatgcctttagaactgtccctatccagaggtggagctttcagtgagccgaaatcgcaccactgcactccagcctgggcgactgagcaagactctgtcccagaaagaaaaaaaaaaaaaaaaaaaagaactgtccctatccagtccataattacatgctttggataagagtctggttcacagccaagatctccagaggttggagagcattagttcagagcacacacactgaaactaactataatatatcttgcatgtgttttttcatgaaaataccaatgcagttagctaatgttaatgtaagcatcattttctgcgtactgtatgctttttaatttaatttactcttcaccctccctccctgccttcctccttccttcttcccttccttcctttcttcttatcttcctatcgtcctaccttccttcccctcccctcacttctcttccctcttagataaaactttctggtgatggggtttttgtagaaaggcaagattctgtagtacccacctgcttttcattactggggtgcaaaaataagggaatagtacacaggaataaaattatgcaccgtgttttgccttagggtgattattcatggaaaaatgataaaactatccaaaaaagagtttacattaaaatgggccaggtgaggtagctcatgcctgtaatcccagcattttgggaggctgaggcaggatgatcacaggaggccaggagcttgagatcagcctgggcaacatagagaaactcccccaaaaataaataaaggctgcattatattaattaaacaaattaatgcataaattcaaagcaaaaggagaaaacgtattaaaagaacataatttagagaaccacaaatttttatcctaagggtttcatattatcagtggtagataatgtccttgaattaccagatcataagtgggggaaaaaatatcagcctcatgccatggtctttattatccactttaagtaagtgacctcatttaatcctcacaacctagtgaggtaggtattatttccatcggtcagatcaagaaataagtcagaggagttaattaatttgtctgaggccacacagaaaatgacagagccaaattcaaactgaggttacaaaggactccaggacgctccagtagattagtagattttacatttctacttttctgatggtattagttaaggtcgaagagacagataataaataaacaaatggaatgtggagaaggcaaacatgccttatgacttaccatgatttttcaggactgtgcaatcaaaatgacattaaagattaaacatgctctttgtcttaattgtacagctaggtcgtggctgcattctcccctcccccttctttcccttccagctttggaatctcaccttttggtatgtaatttattgaattaggatgcagatgccattctaaaataatcaacaatcaaaacaacttatgaaattccaatggttatgacacgtttaattgaaggactttccttgagttaatttctacctgtagcttacccaacatgcattaaaatagcaagacggtttataggaagtaacccctcatgcggggcgaaaaaaaaaacgggataggttgactttacctccttttccctgctttcctccaaatcttggatgttgatatgaaatccatcagataagtattctttccagccatttcaatcccaacctaaacttgggacgcttccaaagaaaatgcctggcttcttacaaattgcccacagaaatagcaatttctccagtgctgctacagaatgggactttttgcttgaccttgtggaaactcatgggttctccaagttgtaaagagttaagaaaagggatggaatgtctggggaatgttgcagggaaggctgcagctctctgctcttagctttctcaccctggaggggatcccaacactcggtggtgcttctgggtctgaggtcttccctaagttctgtttgatctgccaaagagccagcctcagtccactgagaaacagggatgtgccgttatctgcacactgaggtttatttttaccttgtccctggtgagtccccagagacaaggagaaaacactttgggagggagttaagagccttttgcttatccttgaaggaaagcagtctctgaggattagtgagggtggtggtgagggtaggtagggggaggagagtcagaggaatcagagttatttggactgcattttttccttgcctgattaaatcttactgacattggcactttgtgtcactaaaagaacacagccctggatgtggggccagggaccagagggttggcggcagagtctggggctggcatggctgctgggctgcttggctctgaggacccaccgtggagttggaacctgacttgtcgggcgctgaggacctgccaagtgaggaacattcgagttctgcagctgctgctaaaaccatggtgcatctccagggccgtctatcaggtgggaccagaagctcctctttcgtttctttgaagcatgggaaagtggtggtgaatggtggagaagggggcatgagctattgtcacatgtgttcgggactctgaagcatgttacatttaacagggagcagttaacatgaacagagcctcatcttctaggtgccatgcgtgccatacggtgcgccacgtgaagtgcaccgtaaacatgatttaattcagctttcaaagccaccggatcgaggaagtgcctatgtcaccatcttgattattattgtcaccattttgagatgaggttattgaaactcagagaaggatgtaagttgttcaaagtcacccagacagagcctggtgatttcaaccaaagttctcctggctgcaaagacaaaggatgttctttccacaaatccacgctcctctcacaatggatgatttatcaaaccgtgcgtgcatgcggtgtgtgcatgtgtgcgtgcgtgtgcatgcatgtgtgtgcctgtgagtatgcatgcatgtgtgtgagcgcgtgcgtgcgtgtgtgcatgtgtgcacgtgtgtgtgtgtgagtgtacctatgtgtgtgcacctgtgtgttgggggtggtgacaagctggtaaggggaatgtggtgtgtgggacaggaggcaaggcgggaagatcctcaggcaccaacactgagcctcctttcctttacatagtggcctctgaattcagacacacacctctcaacccaaatatgagaaaaggagagaaactttcctgagggagagtggcacttctgagtcagttaactggcggtgggtgcagagcacttcaaaaaggggagacaagagtgctttctccagctatcagtccagtttggtggcattaagccacgtccctgctggccgcggagacttcagtcctgacagccccagccccgcctgagaggacccagattgcgtggggagtggggggcgcaggcagcatagcaagtgaaagaatgtcccttggcctggctcttgaaggggggtgtcgctcatttttcctcctctcacgggtgtttgtaacccagtttatttcattaagtcgacttgagtggttttggccctccctctgtaagctggctcatgacaatacttgtaacccagcatgcacagctggcctttgtatttttaggtgtaatttggtggtctataattccttaataaaacgcactggctaaaccacccgtcccctcgctccacccctcctcctggaatgtctggactttcaggggagggaggcgccctggaagatgtgcccaagggtgtcgggttgatttcacagatgggcacagccccgcaggacccctgctcctgcttcttcacctgcccctgggcaggcggggggtagaccctttacatggcttctgaagacttttctagaattctcgtgcttgaagggcacgtacctaaaagcttcactctaaatatcaagtgtgtctgtcatagatcatatataaaagaaacttttagagaaatccttccaaatttgaccagcatccgaaaagttcacataagatttcccatgacaagctgtgaatctgaaagaatcctgggggaaaaaaaatcccccagctgggagattcaagcagtaatgtggctggtttgtccatttgaagcttttctgaaaccgtgatttagagtcaaaagtccccaagctgggtatgtgggggtaattacttagtcaagatgattctgtctttccagtgattacaaatgagttttgaagccctggcttctggcctccacctctcactttcatttcatctctttctttttttggtgggggagggaacaggttattgctctgtcacccaggctgcagtgcagtggtgcaatcacgactcattgcagcctcaacctccctgggctcagatgatcctcccacctcagcctcccaaatagctgggaccatgtcaccatgctcagctattttttagaatttttttgtagagatgggggtctcactacgttggccaggctagtcttgaactcctgtcctcaagtgatcctcctgcctcggcctcccaaagcgctgggataacaggtgtcggccaccacatctggcactctttgtcttttaaatcaactaagcagggtgggctagccccgcctcaggggccattttttaggatttccattaatgtcgtaagtatactgtagagagtgctgaatgattggccaccgggcctggaaaaagaatacattcctgctcaagcatgactcagttcaactctgcagacaggtcctcagcagcagataggtgcctggccccatcataggcgtttggggctcaaaggctaaccacgcctcgtgcttgtctgtggtctctggccaagccaggcccttgggggcagatatgtccaacccaggcagctgggaggtaatccccatgggtgggtctggaaggcagccaggatggcaagtctaaaccaattcaccaacctgggaggctcagtgaacaaggactggttagcagcctgcagagccaggccgaggggcctgggagaagaagaggcggcccagagcaagaccaggctggggtggtctgcaggaggtccaagattaccaacccatggtcagcatttaccttccccagccctcctttctactgccaaccagggccgttttaaagacatatctgtaataatacatgggccattttccattcttcatagtctcacaggaaagagccaagaacgcaagaactgcatttcaacaaatagaggatttgagaaaagtgcagagagcagctacctttgctcaagaaaaacttcactcccccctcaaaaaaaaatctgttagtcactcctagcctttgctttctccattacagaatgggaatgatagcttcatgcattgtagggattaaataagtgatggagccaggtgcagtggctcacgcctgtaatcctagcactttgggaggccaaggtgggtggatcacctgaggtcatgagttcaagaccagcctgaccaacatggagaaaccccatctctactaaaaatacaaaaaattagccgggcatggtggcacatgcttgtaatcccaggtactcgggaggctgaggcgggagaatcgcttgaacccaggaggtggaggttgcagtgagctgagatcgcaccattgcgctccagcctgggtgagaagagtgagactacgtctcaaaaaaataaaataagcgatggatgtgaaagtgtgtcacaaagactaagaaagatacaaatgtgaaatgttgtttttgttgaaatattgtattttagctgtctttgatcttgggaaagactcatcttgagtgtatttatttattagcgattttaagcagtacttttttgtagtttgcggtgtcttcattggctaaggcgatggctgatggctctggatgagttcacctagggaactttttaaacacacccatactcagtcctgactcccagcggttctgatttagttgatccggggcttaggtgttgggatggtctaaaggtttttgatactaatgtgcagtccacctggagccactgaactgaaggggcctcattctgcacatagcaaaaggcagcatcaggatcactggggagccactttaaatatgtataaaatgtcttaagcgcccccgctgaagtgcagtggtgtaatcatggctcactgcagccccgacctcctgggctctggggatcctccacctcagcctcccaagtagttgggaccacaggcatgcgccaccacgcccagctaatttttgtattttttgtagagatggggtttcgccatgtcgtccagactggtctcaaactcctgggctcacgccatctgcctgccccatcctcccagagtgctggcattatagctgtgaaccactgcgctcagcctacacaatctgtattcttaacacgtgatttctgatattagcaggaactaatgacagaggacaaaaagttgtatgtggcacctgacaaatgagggtgtggcaatgacttgacaagacgaccatgaggactgactcagatcattcaaattaagcccatggcttggcacatccgaggcaaccaatccatgttagctgctttttgtttttgtttttgtttttttaaaatttcttatttccataggttattggggaacaggtggtgttagttacatgagtaagttctgcaccggtggtttgtgagattttgttgcacctatcacccaagcagtatacactgcacccaatttgtagtcttttatccttcacctacttcccaccctttccccgagtccccaaagtccattgtgtcattctttttttttttctttgagacggagtctcgctctgtcgcccaggctggagtgcagtggcgcgatctcagctcaccgcaagctccgcctcccgggttcacgccattcccctgcctcagcctccccagcagctgggactacaggcgcccgccaccaagcctggctaatttttttgtatttttagtagagacagggtttcaccgtgttagccaggatggtctcaatttcctgacctcgtgatctgcccgcctcggcctccgaagtgctgggattacaggcgtgagccaccgcgcccggcccgttgtgtcattcttacgcctgtgcatcctcatagcttagctcccacttgtgagtgagaatatacagtgtttggttttccattccagagttacttcacttagaataatagtctccaatctcatccagatcgctgagaatgccattaattcattcctttttatggctaagcaatattccatcctatgtatataccacaatctctttatccactcattgattgatgggcatttgggttggttccgcatttttgcaattgcaaattgtgctgctataaacatgcgtgtgcaagtgtatttttcatataatgacttctgtttttattatcacgagaaagaatgtgatcactccaggtcacacccagaggcaggatgtggctgtgatgtgccactcagcacagcagtccccttctctaaacagcactcggccccagccctggagggaaacttctgtcccacccgggtttccatctcactcccagaaccatggctgtgtgtgagtggcagccccctgcacatctccagtctcttctcaacggggacttttgtttttccaagtgccttttacatatgacttctttatcacgttaccctcccaaaccagggttaatggcagggcctgcggcttctattaggttagtgcaaaagtaattgcgggtttgccattacttttaattacagcaaaaaccgccattgcttttgcaccaacttaatataattgggggtgggggagacttaaaaggaaaatcattaaaaattatacaaacttacactttgggaggccaagacaggcagatcacctgaggtcaggagttcgagaccagcttggccaacatggtgaaaccctgtctctactaaaaatacaaaaaaaattagccaggtacgatggcgggcacctgtaatcccagctactgaggaggctgaggcaggagaatcgcttgaacccgggaggtcgggagttcgagaggttgcagtgagccaagatggcaccactgcactccaatctgggcaacaagagtgaaactctgtctcaaaaaaaaaagttatacaaacttacatgtgaaaggaaaaatcacaagttacaaatgtaggaaagccaacaactattagaaacatcacaaaattcagaaaaggaatgtgtgtttattaattaacctgccaacatccctattatcctcttcttcctacctattttggttgcctggtctttgatctcttcttcacaagataatgattttataacattttctacagagagagaagagaaagctaagtctgtctttcgcatggtatggctgatcaaaacttgtcctttcattactgaaagaaagaaaggtttatttccaattcataacttgtcattggaaatactgtgcagatttttagaattattgaagaatttgggaagacttcttacaggtttcttttttatatgatctattgcagaacatgctgttgagagtaagattacagatatgtgccttctaaacacagggattgcaggaaaatccaattatattctagttccttcaataaagaaaacattatatggtgcttttgtaattgtgtgtcctatatatgaaatatactcctgacagtgggaacactgccacctgtgtccaggaggtatgagaatggaactctctacttattatcttatcagtctgaggattgggagattcctccacagatgggtttctggctgttggcattttaaaccttctttctcttctgctagccacataccttcacagcctggtgccataagatgcagccatatcttgataagatctctagtccttcatgaacaaggtgggcgagtcggcatttaagggtgagggttcttgctggaagccatttctaggctggtgcagctcaccgtaacttgattacagatggcaatgtctgtggacctcaaatatattcctctctcccaaactgaatatatcctgaccattcttctccttagctgaattcaaaaaaaaaaaaaaaaatgcccagtggtcattccaatgttacctgagcaaaagaggaaatttaacagaggggaaatcaacataggaagaggcattagttggccaggcgcagtggctcacgcctgtaatcccagcactttgggaggcagaggcgggcaggtcatgaggtcaagagatcgagaccatcctggccaacatggtgaaaccccatctctactaaaaatacaaaaatcagctggctgtgatgggcacctgtaggcccagctacccaggaggctgaggcaggagaatcgcttgaacccaggaggtggaggttgcagggaggcagaggttgcagtgagctgagatcgcgccattgcactccagcctggtgacagagcgaaactctgtctcaaaaaaaaaaaaaaacaaaagaagaggcattagttgtaactgatgacaattaaaatatctcacttttgtaagcaatgaatgcatgaatatcttgctaggaatcatcccagagacttggaagatcccatgaagtgaggaaccctgaagtttaagcttcattggtttcatgacaaatcgacctctgtcctctctattgcctccccacccacccccaccctgcctccagctccacgccactcctggctgtgcagtaaaactataggaaaaataaaataaataagaccaacaatctgaattactgacttaccataaattgcttctggccccaaagttgtaaaacacatatgtatggcatatgtaaacctgttttaaatttttctttttaagttagatgttgttcgtttgttcgtggggagggggattgtgtttggtttggtttttgtttgtttgtttgtttgatgttttttgttttggttttctttggtctatttgtagaaaccgcgtccgtcatcagagtcatcagagttgtggactttgtttctgttttttttttttttctaatgcctgttgacaaagcaccaacaagataacacacctggtcctctcctctctggttctgggttggctgtgttgagggtcacagggcacatcccaccttcctccaagcatgaatgcccttgaatgtttcatggttttataattatcagtggttcacccatcactgctgcttctagaaaggaaatatggaccagtggctagaatgaacatccatgtgttaggaatttgaggagagtccttttcctaacctgcaaagcagtcctaacctaatgctctaacactggctgtctggagaccacagagccaggcctgcaatgacctatagatactgaatttctcacacactctataagaaaacatgtgagctaatatataagaacacctaccaacctagaatagggtttgtaattacgtagaacgctttgtgtgttttcttctttatagaaaatatgcttttgaaacagaacttctagaataatcattttgaaaatgcatctctatcagctgtccacatgattagttatagtgacatcaatgatccattctcctaataaaggacaattcctctaaaatgagattgggttttcaatgattcatttttatcttcacaaacagctcatacaaccaatcttggactgatggattctaccatgacccaaccaaacgtttccacatgtggaaagttgggctttgattctcaatttgctatttttgctgttcccctttcatcatttcgttatggcaatgtatgttttaaagagcgatgccctgcatattatttagtgcctacatatggtgtgggcttggccttttctctgattatctacaacatatgtggttgaaaaaaaaaaaaaaaaaagaggcttgcaccaaggaagaacaattagtaaattcattaaatttctctgtcaagtctgcacatttgtttgttttagtttttttcaggcattcattaaggctgtaggtgcctgtcagtaaaggaagatgtgtttgcatttctactggtgtgcttccatttcactcaccctgtcgtttgcaacagtactttcttaaattgacacggaaacatatttttgcaataggatggaaagcaaaactctcacttcttacattttcaaattgttcttccttgatgtggacagtatttgcaaacaacctaacagctcaatttttactttgttcatgaaatattcttgaatctgacatgacataagggatattttcattctccttgaaagcacttttctttgtttcagtgagtaaataatactttgtttggaggtttacaattagctgccagtttttgcatcagccaccagtaatttgggttctgtctctcccgccatatgctaatctaccaccaaagcactgtgggaatcaactgagaatttgagcttttgatcaagagccaactacttttgaacactgagggcttctaaaggtctacttagatggagctcaggaatagtaatcccactggaaggagaacagccagggttttacttaatttgtatttgtttgggagtctcttgtggtggagctggtggagatgatcaggaatcgaattgctctgctattcccttgaaaaaatgcatatttcactaaatagagagtctattttcttaccattctcaaaaggttctagtcttcacaaacgcttgctttttcaaaatttcatcatgtaagagacaagttttgacactaaaaaaaccatatatatgcatatctttttgaaatgttcagagtatatttccaaatgcattttattatttttgattctcaatacccctggggggcaagtactgtcatcttcatttttataaataatggtatcataacgaggctcagagaagttagtggctggtctcctctggggagagatctcaacagccacactgtagacatttgttctggggcaatgatcagctacagaagaaatggtgtattcggagtagtctctttcaataaagtcatttggaagaagatggctagtagcagctgtggaagccaagtggctaaattcctccgcttctccattaattaaatgaagattcattcattcattcattcattcattcattcattcgtgtgtttttgttcattcatctaacaaataactaatgaacaccctctatgtaccagacattgagcaaagttctggaggtagaatggtaaattcattcattcattcattcatgtctttgttcattcatctaacaaataattaatgaacaccctctatgtgctagacattgagctaagtcctggagatgaaatggtaaacaaaaaaaatatgattccatattcttataaaggtggaaatctaacatcatttactcagcagcattaatataatgattagacaaattcaagtcaaattaaaattggaggtcaatgctttgaggacaaggcacctggtaacctaagagggaccttgccttttctgtgatgttgaagaaagctacttgaggaggcactatttggtcagaggtcttaaagataagtaggaattaactaggctgaggtggtgggaggtgaatgggcagaagtcacatttggtatcaaaccaaagttgctatggcagatgggaggacaagagctctgaaccatcaggtggccttatttaataagcatcgtgtgtttaaaatcatttacaatgatgttgcctatacagcttggccactggccctctctactaagcactgtcatacccaccactggcccttttgaaaaccagctggcctattttggaagcctcaccacccagcctcagatggaaattttcttcattctcaagggtatgagctcatcaccacaccagatgggtttccagtgaatgattgtcctgcagtctgattattttcatgtcgtgttaactccctttgaaaaatggaaagaggatatggggttgtctttctcatctttgtaagttggcggagaatttcctagttgtggccacatcctctacagattgagagagagcataccgtttggaaggagagataaattctggctaagggtccacttacagtcatgttttaactgtgctcaatccatttttattataggggtcatcaattaaggtaactttagcttctgcagtggataacttggaaatttcagtgatttaacacaagagaaatctatttctaactcataaaaagttaaacatgctctggtaggtacacagccttccataggatcattcgatgtcatcttgtgactctgccctgccctcctctgggttcagtgtccccttcacttaaaaaaaaggagggcagagaatggaagagctctggtgagagatttttatgggtcagaccaagaagtggggctcctcttcttctcattggccagaacttggtcacatgaccacacacccaactaccacacagactgggaagtgcaggtaggtgggctgccggtcaacccatcccagacagtcagcttagcatggcgttaggagcatgtgccctgaagtccatgaattatatataagtccttactccaagagggtaagtctgaggacaaatcgcttccccttcggagtccaaatcctctcatctataaaatggcaatagccttatttgccacatagtgttatcctcaggaatgaatgagactatatatataaagtacttagaccaaacctgagaaatagtacatgtccaatcaatgttcagtcacagttatcaatttactccctggctacaaaatcaaagcaaatctcgagatgcctgagctttctgtgtcacctgagaaatgatgaatagagaacaatattccttaacgtctcaaaaaattaaagcgtctgtttccaaaataagtgtacgattgttactattatcataactgtggtgagtttcctttcagtttccaggggaaattcaatgaaggcttttggcaaacaattttgtcaggaaacaagctgccgccaaagattccaggcaggcaattgttggtgtcttgggtagcaggtacctcctggggctcacagcagagtgaagttcacagagatagtggttcctagaaatctaaacagccctgtattctctcttccctctgatcccggatccaaaggcgggggctgcccctcctacaccatgaggctttgtttatgcttcccaaggcaagcattttgtgatttgcctgttctggggcagccacggtgccttttccacggcatctactggtctgggccaaataacctgcggttcgtgttctctcttggccaaatagagagcacgaggatgcccccaagcattttcagagcgaggggaagtgcctgttgatactcagccctggggggcaaattgcagctgaccccgtgttgcagggctctgatccaggaatggcagtagaagggcagcaagtgccagctctcacagtgctcccgggtagaaactgagcacatgcatgagcttggagtggcctcattttcacgactgtgttatatctggtttgcctcccaagctcatgaagcgggtaaacccatgaaacaacgagctcagctgtcatgacacaacctggccattgtctaaaacaccctcctctaaaaggtctttgaagaataatgaacctgtcacctgatgattacaaatctaaaaaaaaaaaacactcacagctttttttttttttttttttttttttatgaaacagtcttgctctgtcacccggaggggagtgcagtggcacaatctcagctcactgcaacctctgcctcccgggttcaaacaattcttctctctcagcctcccaagtagctggggccaaaggcacgcgccaccacgcctggctaatttttatatttttagtagagatagggtttcaccatattggtcaggctggtctcaaactcctgacctcatgatctgcctgccttggcctcccaaagtgctgagattacaaggtgtgaccctccgcacctagcccactcacagcttttgaatatggatagacattctctgatgatcattgttgcagggagaggggacttttactgagaagggattctcatacttgcaagtgcccattgctgagaatcccagccaaggctgtccaataaaattcccatatttaagccatttcatagaataaaatactcagagtgctggggaaaattgttaacttagtccaatgtaatcccttctcttccatcaagactacatctcaaccatccaaagaaactagattggttataattgtctagactggttataattgtaaaaagcagaatagcctgggcacggtggctcgtgcctgtaatcccagcactttgggaggccgaggcaggtggatcacctgaggtcaggaattcgagaccagcctgaccaacatggagaaaccctatctctactaaaaatataaaattagccaggcgtgggggtgcatgcctgtaatcccagctcctcgggaggctgaggcaggagaatcgcttaaacctgggaggcggaggttgccgtgagccgagatcatgccattgcactccagcctgggcaacaagagcggggaaaaaaaaaaagaaagaaagaaagacactggtcgggtgcggtggctcacgcctgtaatcccagcagtttgggaggccgaggcgggcggatcacaaggtcaagagatcaagaccatcctggctaacacggtgaaaccccgtctctactaaaaatacaaaaaattagccaggcatggtggcgggcacctgtggtcccagctactcaggaggctgaggcaggagaatggcgtgaacccgggaggcggagcttgcagtgagccgagatcgcgccactgcactccagcctgggcgacgagcgagactccgtctccaaaaaaaaaaaaaaaaaaaacaatggtcatggctgttgttcacgcgactgttttacattccaatcacgcaatctttaatgagttagaagccagttggtgtgctgataccgagaaagaaacacaaaaggataggagacagtctttgctgcacctttcagaatagctaggtaaatcactcgcctaagtaggaaagagataactagcaatgtactgcagtagcgtatggggccaggtgagaaatcccgacaagaaataccactggatttcagaggaagaagcaagctgtgccgagagcaggatctagggaggaagttgaagaacaggcagggtttacataggctcttagagaggggagggttttcaaaaaaagaaaaaaggcaagcaaagggaaaggtgtggggaaagagcggtgggttcctagtcgccgtatgtaatcaactttgtaagtggcttacagtacagagagaaagaaaaggagtgagtgagcgagttttaggggccagaaagatacaaggacacaataaagaataaatggaatggaaaactgaaaatgcaaaaagggctagccatttgttcaacccaatgaattcacattgctcgcagaaataacaccaaagattcccagttgccagctagattctaaatcttgagacactgtgctttctctagcgaaggaggatttttactcttcctcctttttctctggactctgtttatgataaagtgctaatcaaaaaggaggggtatggctgagcgtggtggctcacgtctataatcccagcactttgggaggctgaggcgggtggatcacctaaggtcagaagtttgagaccagcctggtcaacatggtgaaaccctgtctctactaaaaatacaaaaaattagccgggcatggtggtgcatgcctgtagtcccagctagacgggaggctgaggcaagagacttgtttgaacccgggaggcagagattgcagtaagcccagattgcaccactgcactccagtctgggcagcaagagcgaaactctgtctcacaaaaaacaaaaaggaagggttagatgcagaaacataaacactgggacactgtaacctccctaaggtctctgcctgtttgttgaaagtttcagcttcaaggccggctttgcctttccacacatagctctgcggagtcggagccatccactagaaggcgggctgatcttgttcttcataaactgtttgggtttccccgtggttcagagccactgacgcctttcacgactttctaagccaattatttagcaagaatgttctggacaagcagacaaccagttctcaggccttgagaaagtgcccagtgtcggggctggagggaggatcagaacaaatgtggaacttattgtgaatctcagttttcaaaaatgctcaacgtctacactttcccccttcccaggattttgctaagggccaacaccagggagtagcccatttgttttgttttgtcatccaacctcttgctgttttatgaaatcttaatgctgctggaaaattcaagtcgattcatttgaatcttagtactcactgcttaattgtctagtaaactaacagttttctctgccgctcagaaaaatacacagccatacatccacaattattttcttttccctttgctagaaattttagattagcatcatggcgtacacaagatgagccttggtgacttcagtgtcagactgacacaggtccatactccaactccaccatttacccgtgcatggacttggcaagcaactttgttgtcctgagcctcagttttgtcttctgttaaacggggtcaaaatcagtttcttctagagataaagaacctacataaggctggacatagtggctcatgcctgtaatcccagcactttgggaggccaaggcaggctgatcacttgaggtcaggagttcaagaccagcctggcccacatggcgaaaccccatctctactaaaagtacaaaattagccgggtgtggtggctcatgcctgcagtcccagctacccaggaggcggaggcacgagaatcacttgaacctgggaggcagagtttgcagtgagccaagagtgtgccactgcactccagcctgggtgacagagtgagactctgtctaaaaaaacaaaagaaaaaaagaaaaaaaagaattctacctaaatcacttagcacactgtatagcacaaacaaggtgctccgtaaatggtagtatttcattattagtattttactcagtattgaagtactcctgggaatctgcctttctaggaagatccctttgcaacaactgtagagatgaatttgaaagggtgtaaaataaaagccacctgggtgtttttcacatgcataaccgatttcaagccaagaatgggagaaactggaaaataccggaatattcctcatacatactgctttatgtattctaataatgtctttccctttctctcagcattgactactcacagccccaccttccttttcattgtgcttttctggaaggctggttatctccacatatggaacacagtttctctttagggcctttaatacgctagaaattccaaaacaaagtagaccccggcagggcactggctccacgttggcaaataagcttgccatcaggcgccacttctggtattacaatgtgtttttcattaaggagggaactgtagccccagacttcaagggttggtttctagccatatgcaaaggcctgaggactagtactgcagctcatctgcagaaaagaaatgcccagggccagagggaatctcctccaccctgctgtattggtagtccatgtagccaccagatacttcagtgacttggattaggagtacgatggatcacccatcatcaaatggcatttaagagcagaattaggccaagcatagtggctaacacctgtaatcccaacactttggaaggctgaggcagggagaacactttaggtcaggagttcgagaccagcctggccaacatggcgaaaccccgtctccactaaaaatacaaaaattagctggacgtggtggtgagcgcctgtagtcccagctactctggaggctgaggtgcaagaatcgcttgaacccggaaggcagaggctacagtgagctgagattgagccactgcactccagcctgggtgacagagtgatactccgtctcaaaaaaaaaaaaaaaaaaaaaagcagaattattaacatggggttggaagagttggaagactaccttaccatagacaattgaatatgaggtatgctttgttagtagtctgtgacatttgaaaaactggccctaagaaagaaaattgtgtccatggctaaaagaattgaagtgaatggcttttattagaagaaaatccaaattgcttttaaagataatgtgccgataatttctagcccacttacaatctaatgcatcgcaagttaaaagtgtaacatgagagaggggtttgagagaagaccctgcaccaaacaccagcactctgaaagggtttggtacggggttttgaacccaagccagtggatctgagatgaactgcaggtgctgccttggcagggctgtgatgatgaccccaataactcacacaggctgccagccacagagcatagggcactgctgccatgcatggatggtgacaccagggtctgcagggccctgatggtgctggaaggggaatttctcctctcaattccccttcccatgacttgagcacctggagccactgattggatttggctgtgtccccacccaaatctcatcttgaattgtagctcccacaattcccatgtgtcatgagagagacccggtgggaggttattgaatcatgggggcggatctttcccgtgctgttctcatgatagtggataagtttcaggagatctgatggttttgtaaacgtgtgagttcccccgcacacgctctctcttgcctgctgccatgtaagacatgccttttgccttccaccacgattgtgaggcctccccagccatgtgaaaccgtgagtccattaaaccactttttctttataaattactcagtctcaggtatgtctttatcagcagtgtgagaacagactaatatagccaccgagtgcaataggaaactgattagaaagagggactctccttttgtttatttctttaccaacacaacccaacctgcggagaagcagcaaaggctaaatggagcagtgaacactgtgcaggctttggtctgtttctgccctgatgtcctagcacagggctggatcctggtttttgcttgtgatttgtttttgtagagaagggataagtaccggctgctgccctatggtgattctttgtaaagtgagcttccagtatgatgatgatgatgctgagttcttaaactttaaaaaaggtaaaaataattgatactgcaagagttatgacaatatgcagttgtctacccttatccttgagggggtcccttccaagagcctcagtgggtgcctgaaacctcgaatagtaccaaaccctatatacactatatatacattactttggataaagtttcatttataaattaggcatagtaagagattaaccactataactaataaattcaacaattctaacaatatgccagattcgttgctcttgtgcttgaggctattaagtaaaataagagtgacttgaatataagtactatgacctcaagacagtcgatctgggaaccaagatggctactaggtgactagtgggtgagtaatgtggacagcaggagctagacaaagggagggtccatgtcccaggcgggatggagtgggaaggtgtgagatatcttcacactattcagaatgacatgcaatttaaaacttatgaattcttatttctggaatttcccattgaccatctttggacttcggttgacccatggttaactaaagccttggaaagcaaaactctagataatgggggactatggtatgtagttatcactttcttgggggcatcgtgccatagctccctttagaataaaaagggaaatgtagatgttatgggaaaatgttcacaagctaagggtagatgagaacaaaaacaggacacaaaattgttcctgcaaagcaacctgagtttcacaaggggaagagcatctatatggaagagcctgggaggaaaacggcattatcataaaagcaggggcctttgagtacttcccatatgggctacaggttctggagataatttagtcctcacatcagctggtgtaaggtaatagctatgaccaccatcctcatcctacagaagagaactactgagcgttaaagtttacataatttgggccgggcagggtggctcacacctgtaatcccagcatgttaggaggctgaggcgggtggatcatctgaggtcaggagtttatagaccagtctggacaacatggcgaaaccccttctctactaaaaatacgaaaaaaaattagccgacatggtggtgggcaccatggtcccagctactcgggaggctgaggcaggagaatcacttgaacctggaaggcagaggctgcagtgagctgagatcatgctactgcactccagcctggttgacagagtgagactccatctcaaaaaataaaaaattaaaattaaaaaataaagtttacataatttgcaactacctctcagtaagaagagacagagccagatttgaaccatcatgcttctagaatttctgctctttgacatatagcagttattttggggtaggaattacaggtacattttaaattcctttcactttttggtgtcttctttttttgttgttgttttcttttttagagacagggtctcgctctgtcacctgggctggaatgtagtggtgccatcttagctcactgcagcctccaactcctgggctcaagtgatcctccatcctcagcctcccaagcaactgggactacaggtgtgtgccaccacacctggctcctttttaaaaatttttttgtagagatagggtcttgctgtgtatcccaagctaatcttgaactcctggcctcaaacagttgtcctgcctcagcctccccaagtgctgagattacagacatgagccaccacgcccaggcagccactccatttaaaaaataataataataaaaataaaaagcatatattacttgaaaaatcagaaaaagagtataaaaagaaaaaaaaacatacatcatggggaaagtcatacttccttcatcttggagattttaaattaaactggatttaattggctctgaaacaagccccttcccaatgtaagatgaatatcttaaagaacttcttaagaactccaaaacttgaaaaagcaaagagaacagatatttgccccaaccacttctctgtaaaattttagattgtttattattattattattattattattattattattattatttgagacggagtctcactctgtagcccaggctgcagtgcagtgatgcagtctcagctcactgcaaactctgactcctgggttcaagggattctcctgcctcagccgcccaagtagctgggattccaggcgcccgccaccacgcctggctaatttttgtatttttagtagagacggggtttcaccatgttggccaggctcgtcttgaactactgacctcaggtgattcacccacctcagcctcccaaagggcagggattacaggcatgagccaccacgcccagccaaaattttagattgtgatacctgatcaccttaacatttgtcctgtcgatcagcacaactccccgaaatgtggctggttggatcccttcatctgtactctccagcccttctactccacctctttcagcagctttctctttcaactttccccacttctttcatcttcaatatctccctctgtagttttcctttgagtctgcattcaaacttagatcttcccatcaatcttagaaaatacgttctctcaagcctgctacgatcccaagatggcgcactacctctctccttccttccctactagccatcaggtgcaactcactcttcctggcgccccgcatcctcaccaaccactccatatgccctcataaccttgacctctgctcctgctgtccctccttccccgaaggatcaccaatggccattcggttgtcacacccactgccatttccccatctgcctcaatgtttctgtagctccttctgtggaagcacccagcacccttggcttctctctcccggccctagcctgcccttcttcctccttctctgagccttctcattgctagtttctcttgctcctcatcccacctaaatgaataaacccaaagaggaattctcagtcttgtccttttctctctctctactcccttcgaatctcagtattttttgagcagcattatgttcttgtcttagcttatctgtgactctcaaatataagggaagcttccattctccatggcaagagagaagataagtaaacaaataagcaggataaggtcatcggggaggacttcctgacatgatgacatctgagctgaaacccaaatgaggaaaaagaatgagccaagcaaaattctcaggaaaggacacagggaaaagggaagcgggcgtgcaaatgtcctgaggcagaaacgaatgtggcacatggtgggaagagagggaagacagtgtggctagagtatagtgagtaaaggggagggtggaagagagagaggctggaaaggcagattcctccaggaaatcttaagtccccacctcacttgctccttctgttatcctacctggtccattctgccttgtcatggcatttttttacaattatttacatcatgtcttctatctcctaccctaccataggcacctctagtgggaagatcaggtcttacttgtttttctgtcccctccagcgctagatcaacacagtgttaaattagttgaatttcagtggaggagataagacagaaatgaaatctgtgaagattcagactttcccaagttaaaaccagtcttgagttacagatcaagatgatgccagaaataacatcacactgaaacatcagtcaaatgtagtcatcatggcaaaggccaaatgtccctttctttttttgcctccgcctgcctgggaatttagcatcccctaaagccactcatctgggacaggattttagggtgtgtacatgtttttcatctccacaggaccagctgtgtgtggaggagaattcctaacatgggctaaggtcagaccaaattaaccccaaagactccttccccagcaaagagttgtgaagtaagtcagtaatgtggctaatgaaagaaatattttctgagatgttgtgatctgtcataagaagtgttgattcttgatgacatggaaaatgactaacatcttatttcatgcattccaaagagaaaaacccacagatgtgagtgctgctttccataccccagtgcttctgaaacaagacgctgagaaatctccatggtttagggtgcagcttgagccttgtcagaaaacctaggctccagtatcaactcggtagcatttattaactgtgtgacttgggatgtcccttacacactctggctcttagtgccctcgtctataaaataaggatttataaaatctatctaatagtactgatgtgaagactaaaaatttgtggaattgctttgtaagtcataaagggtcttacaaaatacaagtaatctcaggcttttgaaaagtcttggcaatatcaattctggtcttccatatgtggagctacaagaacaaaatattcccagagttctttttgattaagtatgggcctagatgtgagtttttaagacccatgatgtatttcccaaatctggaagatgaatactaaaagaaaactcaacttgaagtcatgtataaattcctgtgtgaactaaacttcgtgtaagtaatcaaagctgtacttgaaaagttaacttttagaaaatgcaagtagaaaacttctcattaccccatcctattctttctttcttttttttttttttttttttttgatcactagaacctagaacttgggagctcgtctcacagattcacccataccagggccaacaacgtctttcaccctgattgtcaatagcagaacctgcctttactgagtttatcgatcttgaaagtgaaaggcctttaaaagtggttacacagtcactgaagaccatccattggcatgtgttgaattgtatttattccataaaagatttaatcaacaatgaaaataaacaaactccagttcctaagcactcacaactgcccatactttaggtagcttgaacatgattgcaaatgccataatatttgaatgatcaaataaattgtttgcattttaacttattaaaaatcctctcggctgggcgcagtggctcacacctgtaatcccaacactttgggaggccgaggcgggcagaccacgacatcaagagatcaaaaccatcctggccaacatagtgaaaccctgtctctactaaaaatacaaaaattagctgggtatgatggtgcgcacctgtagtcccagctactagggaggctgaggcaggagaatcgcttgaacctgggaggcggaggttgcagtgagccgagactgtgccactgcactccagcctgggtgacagagtgagactctgtctcaaaaaaaaaaaaaaaaaaaatcctcttttccatgggcttatcaattctcctcatccccaccacctgctctctgctcagaccctttttgcccatgctgtaccttagagctgcctgcaaaatgctcctaacccctccccatcttcatccagtcatcttcaccttcattccatttatccatcattgtataagtcacttgtctgctgagatatcagtacctttagtggctcttgattgcctattttagggccaaagatttcagcagcaaagacctttggcagaattctatactaaactccgaatatgtaaaatagatttcaggctgggcacagtggctcacaccagtaatcccagcactttgggaggctaaggagggaggatcgcttgagcccaggtgtttatcattgcattaagctatgattgtaccactgcactccagcctgggcaacagtgagaatcctgtatcttaaaaatatatatatatatttcaacatgacattttagtagcataagtgaataacatttatttattacaagtccatttaatgagaaccatatttgcttgcacaataacaagaaaatcctggaacacactgataaggtgtttttttttttttcaatttactttttattttttatagaggcaagatctccctatttttgcccaggctggtcttgaatccctggcctcaagcgatcttcccaccttggcctctcagtgctggaattacaggcatgagccactatgccccgcctgataagtttgttttatttttttgcttattttttttgagtggacatgcacaggccagaatatttgaaaaggacaggacagagttactcttcttgactctggatgacatggagaataaccatccaatgaggcatttgggaaagtttcaaacagatccaaagtgatggcagaaggatctatgttctttaccaagacatgcaggaggagaagcacagattaaacactggaggcttctgctgtactatggcatgtatttgagtgaaaatgttagacatggtgtatatatatgtgtgtgtgtgtgtgtgtgtgcacgtgtgtgtgtgtgtatgcatgttgcatgtgtgtctcttttataaatgataactaaatccagttttgacagactcccctaggcatcccgtatgaccacagatcttggtttggtcatccaagaccttcccaactccactccatcttaccacagagaggggtaactgagtgccctggttttaagtcagtggactctgcaacaagctccccttgtttaaaatcccactcaattatttactgtttgtgagattttgggcaattcagcctctgtgtctcagtttccttgtctgtttaattgggaatgatagcagtctggtgaagattaagtgtatatagagagtgctaatatctccaaacttgcctctttctcctagcgcatccatagcatccacgtagtcaactgctctattccttgtccccaaaacccctgggacactcaggtctccgctttcctacctgaagtgtccgtagcctggaaggctgcaggctaatgcaattcttcctttcaggtggttagattcctacccagcctttcagacatgccttgatggaaggtttctgtgatgaccttacataacccacaacaatctcctctctgaagtcctacagctcaggtaccttcctgaagcctcccaagcttccccatatgagcgctcctcttgtctataatcatttgtcccatgtctgccttcctcttctttgtgccataagctccccgaggtcaagtctgctgtttattgaagcatggccagctcacagcactcagccaggtataggacaggcatcgagagatagacacatggagacagacagacagacacacagacagaacacatcacccatttgacacacaccttaccttgccagttctttctttacaacctttataggctggccatgctggtcttcagtggaccaatcacttggcaaggagaaggcgagtaaaagaacagaagtggaatttggaagatgtgaaagcaaagatgagaaaaaaagaaaagattgggcaattttcccaaggtaaaggatcactaaaatgtgagttggtggccgagtctacaccagagtttccagactgacccaagggagtgggatgtgttcagtgtctaaaagacacatgtacatgacttgggaaagttgcattaggtaaataaacaagtgacgatgacataggagcacctagaattttttttatggtgagaaaacactcccttctcctcctgaagtctctagcgttcgctgacttggttgacaatatggctgaggtagggacagggattctgagtaacgagcacctctttcaacttcctggttctagccttagccctcagggcatcagaaagattcttgcgttcagggaagcatctgcctaaagagtccagcagagttcattctcctagctctgaggtgcaggaagaacttgcatgtgcctctgacttcactggctctccccaggcatctgggtcaggaaagggacataaaccagtggcatcccttgattgtcccccttttgatcccaactcatagttgtgaagtccataattattccacagaggggcagtcctgttttttacttccctaactacgtgctggtgcattgctctgagacgcaagaaggcaactcctagggaatgtgtaaataatgcctgtgctctgattgatggctttgtttgcagccagaggaagttgaaactggggcctctgaccctggcctggtctggcttcttccttgaagcctgcagtcatgagcaaggaaatgaaggatcacttcctggggataactggatcaggagaaagcaacaacagccaaatgcatagttccctctcactgtttaaatggggaggtggcaagatttcctggggtgaccctggctctataatcaagtgagctttattaaatggccgcatggagcatgtaaattctcccagcccagcttatataacacactttgtgagaggcggaaaccagttcgaatttgaacctctgcagagccctgcctggtagatttgcagacagcggtgcccatgagacatctgaaactttacgactacatatttaagcatttatgagacttgaactgtgttccattaaaatggaaaaaaaaactgcaaggaaaaaaatcctgagacttccagcaagggtaattagccccaaatgtttcataaaggatttgatagcattctggttgtaagcccctttccccggtctgtcataggagagaaagagaagaaagaaacctattacaaattcaccattacttaaaaaaaatcacatgacaaaaccaagcagctggacccaggtttagaagaagactaaccatacagaccctatcccaaagtgacattaaaattttactggagagaaaatatttaagatatggacttggttgtttttgtcatacctaccaaagaaatcccttcctttttatgcccctgttcattcactcaacttcttcccttttgtttctaagtttggcactagtccggctggcttagtgccttccaacctcccaccaggcctgggtctatttctctgttactcccattgtactgttgctggtggagagaccggaggggcgatcactggaataggagatgtccacgtaaagccagtgttaatccctgcctaggtgacatcacataaatatggctcaacctgatcacactgaactccccatgaagagggccacaccacagggttcccatcaggctatgtctggcaaagactcagctattccgtgttcttcattggaaggataagaagttgctttctatctgacactgtgtgcacagacagagaaggcacgtatcattagaatgtattttttaagcctttcttttttacggaaggaactttcagaatgataagtcagcaaatgaggcagcattagtatgcagaaatagctacaaatatataacagaagagttttctatctaatgtcagggaaaacaccttgaatcttatgcagacctgtcatgttctgttgaagggtgtatggtcccagtggtccccaacttttttggcaccggggacctgattcatggaagacaatttttccaaggactgaggttgggggatggtttcaggatgatttaagcacattacatttatttctattattattacattgaaatatataatgaaataattctacaactcaacataatgtagaatcagtgggaaccctgaatttgttttcctgctactagatggtcccacctgagggtgatgggagacagtgacaaatcatcaggcattgaattctcataaggagcatgcagcctacatccctggcaagcacagttcacgaacagggttcgtgctcctgtgagaatctaatgccactgctaatctgatgggaggtggagcccaggtggtaatgtgagcaatggggagtggctgtaaatacagatgaagcttcactctctcacggctcgcctcctgctgtgcagccagtctgtggcccaggggttggggatccctgctacataagatccccaagaaataaagagacagctctgatggtttaggtattcacctgcccaaagacagacctggacagatggtctcttttggtttgtccaactctttaattctgttgtctctgaatggtaggaacatatcgagtgcccttactgatggccggagttatttatagtctcatcttttacgctgtcaccttgaaggtgcctttcttcccactgagcagggccactctgctccagttcatctgagtcagactttccacagcaatttatccgatccacaccaacctatttccataccaagtatttttaaagacataagcaatatttggtttctttgttatctaaacagaaggaaaatcatttgctttaaagttacatgcaaggtaacactctttggtgtgggtctacttttctttctttctttctttcttttctttttcttttttttttttttttttttttttttttttttgagacagagtcttgctctgtcgccaggctggagtgcagtggtgtgatctcacctcactgcaacctctccctcccaggttcaaatgattctcctgtctcagcctcccaagtagctgggactacaggcacgtgccaccacgcccagctaatttttgtatttttagtagagacagggtttcaccatgttggccaggctggtctagatctcttgaccttgtgatccatccacctcagcctcccaaagtactgggattacaggcgtgaatcaccgcacctggccgatgtgggtctccttttcaacaaattatctatttttgctcaattatctatatttgctgccttccaacctcccaccaggcctgggtctatttctctgttactctcactgcaccgttgctggtggagaggcctgaggggagaccactggaataggagatgtccacctagaaccttatgcagacttgcctaagtttcctcttgtgttcttgtcctggacatcttgccgtgtgagaaagcacggttcctcccaaatgtaattgtaatgtgtgatatgaaatgtataactcgcagttttagaatgacaacattttataatctatgaaccacctccccctttctatgatcagatatttcatgaaacaaaccacaagacgtcttgcttctctcaaggaaaatgaaatcaaaagacataggtcttttttttttgcctttttgttgagatggagtctcactctttcgccaggctagagtgcagtggcacaatctcggctcactgaaacctccacctcctgggttcaagcaattctcctgcctcagcctcctgagtagctgggactacagacgcgcgccaccacgcccagctaatttttgtattttttgtagaggcagggtttcaccatgttggccaggatggtctcagtctcttgacctcgtgatctgccagcctcagcctcctaaagtgctgggattacaggtgcgagccaccacgcctggctagatctcttttttaaaacttttctttgctatctggaaataagactttctgtttttgcacaataccacagatccttttaaaatgatgtaaaacaattcattcgtaccttttctaggggcttggtcagcaaaatgccagccatatgtcttgcagactgttctaatgacaagagtctgggctggcctcagacctgctccagtgtagccttgagggcccgtagctcagttatctctgtctgatgacttcaacttgggcttgcctttcagaagggaggcttcttttgttcacagacctcagcccccattgcaggttcgccctggctgctctcccaggcagtacacagggaggggcccatcattgcagagacatctatggagatgtcaagacagtgcctgcgatgaaagggagcgctcattagtgcctttaatgaggcttccccagtttcatttgtggctgaatcagaaactttctgaatcatttaccctgtggcagagcagttttcagacatgagaaaggatagggtccctccatcacaaagaaacctccatgaaaacttgacaccattaagggcctggaacagggcgtggtgtcttcagaaaaccacaccttcccacaccaaggagggtagctggagtgaccgctctggaagaccctgtggcttttctgctgtggtccaccatgtgcttccctcatatgggcacctcccagactcagggcagttccagaccagggtaaaatgtaaaacagatcttaccaatatagtagaaaagagaggcctcactccattccagggccagctaggaggctgtggccaccttctctctaagactttctgtttttgtgcaaaattcagagatccatgtaaagtgatgtcagggaagccattcacaccttttttaggagccttgtttagcaaaatgccagccatgtgtcctgtagactgttgaaatgataggtgtacagtcaggcctggcctgcccttctgtctgagggcaagcacaaatcctaactgtaagtataattctatcagctcaagcctccaagtagcaccaaagctcctctagttaacctgcctggtgtctacgatctgagactcttctcttaccctgttttgttttgctttgctttttgagccttcatagttccttgggctgccattttttgacaaagtaatgttatatgtttggctttgcatacacactgtattagtccgtttacacgctgctgataaagacataccccagactgggtaacttataaagaaaaagaagtttaatggatcatagttccatgtggctgaggaggcatcacaatcatggtggaaggcagaaggcatgtcttatatggcagcagacaagagagaatgggagccaagcaaaaggggtttccccttataaaaccatcagatcttgtgagacttattcactaccatgagaacagtatggaggaaaccgcctccatgattccattatctcccactaggtccctcccacaacacctgggaattatgggagctacaattcaagatgagatttgggtggggacacagccaaaccatatcacacgatttgcatttaactaaattggaccctttcaagtcccatggttctcggatactaggatttcaatccttgctctctttccccgtcctctttctgagttcattagaatcttcccatcctgcttcttcctttatagtcagtagcaccagagagtagagaatgaatcctagcctggccactgaccagctgtgtgatcattggttgacacaaccactctggcccatggtttaccggagggttggactaggaaatcgtaaagacatttctgagctgtaaccttccatgaatctatagataagaaaacagtattgggctgcttggaaagataaaatggaagctctatcaagatgctgttgtccacccaaggacatcttctcttgacattctcatcccatcactacccgggtcagcctcaattcctcaatcctttcagaatccacttagtaagagagttaaccttgtgtgaagaagcagtgatagcgccattcctgttgcaggctcatagcacggaggttgagatggagaaataccctcaggcctatacataggcattattcagaaatctaattttaatacaagaccatatttttaataggacaagaaataacatgtatggcatccaattaaatgtagactcctgtcttttgagtatgaaatcaacacaacattgactgctgtcctctcatggaagtagacagtaggaaagacctcacattctagccccttacactgcaacagttgacatattcctaaatggagagtgaggaaaggtgaggagggctggatttgaccacaggccttgaagaagttgactgcccatgggaaaagccaatctgtgaccttgaagaagtcaacccatgaccttggcctcagttgacgctgctctgagtgaagcattgtcagacccccaaggaagcacgtactgagaaacatgacttcactccatgagtacttggggaaactgaaagggtttgtgcccttcagtttccccaagtactcatgggctgtagcaatgtttctcacttcctaacccataaagccaaatggctcatggtggaccggacttcaacaagtattaagttgttttctcacatttatttcaatcaaagagctgcgctgtttgcatggccaaataattggaaacaaataccttaatacaccttacaaatgtgtatccctttgcactttagaaagcaacttcaactatcaggacagtgagctttgttttccaactaaggtgatgagatgggaaaacctttttgctgccagaatgggaaatctgatttaacaaagactagatactgacttcccttgtggcagccctgttgaaaagaaatgtggcacatccagaagttgtctgagagggggtcactgtgcagtactgattattcttgttgttgttggctctgcaaagtaattccaggattttgttccattctatatttagtcatgcctgctattaaattagaatacttttatatcattgacctttgacatatggacatttttctggaggaaaaaataacattcaaactctcatattaatgttgggaaagtacaaccctcaaaaatgtggcagtttctaaagagccaggaactaaccaatcagaagtttatattacaaataaatcccactcattatgccagggaagcatgtcaagcattggcagttatgctggccaagctaaaatgcttcctgaaaaattagaattcccaaataatgcattacagcttttaccttatgaaaaatagaggaaaattgcattggtaatctcaccataaaataaaaagtagatccaaaatataactaaaatcatgtggttaacaattttcaaaaccttaaacgctctccaggatggtttcactccctaatctcaccctacattgattaatcccaggcaatttagaataatgtgaaccatacggttggtactggcgttgaattccctgcagctgtttcaatggtcttgccttaccgtgtagctgccacttcctcttaaccctcgggtttctcaatcttggtactattgacttttcagaccagatcattctctgctggagggtggggaggatggtgctattctgggaattctaggatgtttaacagcatccctggcctctatcaaccgatgctggtagcgccttccaggttgtgacaatcaaacatatctcatgatgttgccttggactattggtacttggtactattgacatttgggaccaggtctttctctgttggaggttggggaggacggtgttgctctgggcattccaggatgtttaacagcatccctggcctctaccaactgatgctggtagcaccttccatgttgtgacaatcaaacatatctcctgatgttgccaaatgtcctccactggctggagagcagaggtgcaaaatcacccctagtggaggatcactgttaacccttctgtgccctgtataaagctttgccaggattttgtgctggataaaaatgtaatagtatactctattgaggcaatagaagaacagagcaaaaagtagttcatataaaaccacaataagagtctgggcacagtggctcatgcctacaatcctagcactttaggaggttgaggtggatggattgcctgagctcaggagtttgagaccaccctgggcaacatggcgaaaccccatctctactaaaaatacaaaaaattagccaggcatgttggtgtgcgcttgtagtcctaggtattcgggaggctgaggtgtgagaatcgcttgaacccggggggcagaggtttcagtgagccgagatcatgccactgcactccagcctgggcaacagaacaagactgtgtctcaaaaacaaacaaacaaacaaacaaacagcaacaacaaaaaacacaacaagaatgctttctgaacacaaggaaaacttctaatactgagagtgcttaataatgaaatgcattcaatgctattctattatttgaaggtctttaaaaattagaagattatctgtagtggtggtttaggggcaaataaatagcacaggtttctcttaaattcctttttcagactttttattcagtttctttcatatttaacaaaaaggataaacagaaaagcatgtgggtatataagaatacaaaggaaaagtaaattttttcacaagaagtttattttccttctttaactgaggaactaggcatagaaaaaatgcaagaattgcttaaatgagaaacagtgaagaatgaaattgaaggattagtggatcgttcacaatataatggttacaattaagagatttgtctactgataaatgcttgcgaacacacgtggtactaactgttcttccatccctctcactggaaatggatttagagattgaagagctttttaaattttaattttaagtccctttttttcatttcagttttattaatcttcatcataaatattaatttatgagcactgatgcccaaagagcctcagggcttactcacgaaggataatgaacatcactgctgcagttaaccaaaacgcagcctgagtgtgaaagagctgatttgttactcaatttgaggcgggtctaaacctaaaaggcacccctctttatcggtgatcatatttaaaggaacaccgctgtaagtataggtaaaacatttaaaggctgggcgttgggttggtgacgggagttgtagttttgacttctacaacatgaaacgttaactcttaggtatctgctcataaagttgttttttagttcatctgctgaccctttctgcttctctgagtacttctccatgcggacagttatttcaggtcttccaggaagcaccactgtaatcagagagtgagatccttcaccacccacctgagggttgctgttattgaaggagtgttattctttcctctttctaaagacatgtagcttctggggatagcatgcatttgatgctttctggggagaaaggggattgcccaacaaaaggtttgcagaaatgtcacccccagagaacatttgcaaccctccctttgctgtcaggagtatttccacattgctgagaactcaaggctcctttggtgagcccagccagaagggcaatgcatgcctgccttgttcctggcagctgagaccgcagcagcttctagtaagtggatcagaagcaacagaaagaaatgtcaagactatttatttaaggggaaaagcttagttaacacgagtgtgccatgtaagtgatgaaagtgtaacaaaatgaggagttttttaaaaaatcaatgtagaatatagaatcttaaatctctgagacacaaagcaacccaagcatccttggctcaccccttcatttgcaaggaagagggtcttcatctattcaggcttgtataatagaatcccatagactagatgcctcataaacaacagaaatatattccctaccattctagggcctgtgaagtccaagatcaaggtgggggtagatttggtgtatgaaaggggctcacttcttggttcatagacagcagtcttctctttgtgtcctcacatggcagaaggggtgagggagattctggggtctgtctcttatgaggacactaatctcattcatgaggcttcaccctcatgacctaatcacctcccaaagtctctccatcctaatatcatcaccttgggattgaggattccaatataggaattttggaggagcacattcagcctatagcaaagagccattcttttcagtccacccaagatgaataggagactggtccgaagagtttggtggcagaactgggacctcagactctagccatttttggcactgcagcacctgttgatgacttagagtgatgactaccgtgctgcatgaaaccaggagtccagttgaagctctttactttcccctaagatcatactctgactcctccaggaagctttcctggattatacacatctgtcttatggttacttgtgtgccagcacctaaagggtaagaattatatccacttttgtttatcttattcaatataagatcttacatcttgttcagtgtaactgagtccatatctgattcagtgtctgggacaaaagagaatctaaagaaatccctcttgtgccaaacacatttccctttagttatacaaatctaccatggcagctgaagggggacaaaggagagagacacatcctggtcagggcaacctgatgcaatggaaagcacacagattctagagttagacagacttgggtttgagtcttgctttttctacttgcagaaggcatgttttgagggaattcatgtagctttttgagcctcagtttctttttagtaggaaggaggataggagtatctaagctgccagggctgataggagagtccaacatgagagtaagtggaaagagcacaacacagccctggcacatcgcaggtgctgaaaaaagggctcctagaggctgttccctgctttctggccttgcttcacgtcaccactgaaaaataaatatcagagatgataaacttgtctttatcagttttctggaaaacaaggcacaccatatacaacaatatttttacctaacatattggcagattggcagattgtcctgggattttctggaaaatcgttgatcatttggtaacaactttttttttttttttttttttttttttttgagatggagttgcactcttgtcacacaggctagagtgcaatagtgcaatagcatgatcttggctgactgcaacctcctcctcccagattcaaggaattctcctgcctcagcctcctaagtagctgggattgcaggtgtgcaccaccacacatggctagtttttgtatttttagtagagacagggtttcattatgttggccaggctggtctcaaactcctgacctcaggtgatccgcctgctcagcctaccaaagtgctgggattacaggcatgagccaccacacccagcccatttgttttcagttctaaaatgaggactgctgctctaatcttggattttcatggttttatggcctaaatgtttgtgtccccccaaaattcatgaacgggattctgccctcgtgaatgagatgagtgctcttgtaaaagaggccctagagagccgccttacccttctggcatgtaagaacacaacaagaaagtgccatttatgaagcagacagaggcctcacctgacgccaaagctaccagcaccttgatcttggacttcccagcccccagaactgttagcaataaatttctaatgtttataaattacccagtctaaggcattttgttatagaagcccaagggactgcaacacatggttctcttcataacctgatattgaattttttactaggtaattatcatgtgttccatttctagtttatctgaaatgaaaccaaaatataatttagcattctaacgtaaggctatttatgtaaaaatgttgctctccctgcaagagatcgagagcaaaaggaccagccatttttactgcagcaattgtggagtgaaaaacttaggccctaaggaaccttcagtcttcgtcaacaaggatataagtgggattaccctgcaaagtttgcttctctttttcttttggttaatgaatgtgaaaggacagccagcatctccatttaaaaaaaaaaaaagttttaaaatgaatgactaggacactttgagcccctgctttttcagctataaaattaagcttgcgcttccaagaattcagtgaatgaagtggatccgtagacatttgtggaggaaaagagttcagacttttctctaaattctgatgtcctcatgcaaaaaataatagttttctctgtgaatctagattgtctacacctcactagaacctgttccctgttctaggcatcatttgagtgaggtatgataagaattaagaaaactatgtctctaaaacaaagcactttcttgtcctttccaaggctccttctatgttcctcaccacccttaatgctgtcatagtcaatgtgttttaggcatagagctcctatattttttccagggtgcttgccaaatcctgtagtgcttttctgatcacttcttttagatctccattcataatggtttcaatgttcctttacaaccttagttgattctgctgttgctattttctgcataatagttatagagctgtcaaggatgctgtatctccctatgcagttatcctggtgacatttctagattttgttcagcttccctgatgggtcatagaaatgagcttttcccctgtttcaccacctgccccctgctcccctagccagcttgtctgctgtccaagtccttggggaagctgcttcctttctatctgtgtcccaggggcctctaggggcagagatacaggagagaggcaacagacattggccaccactacccaaaatatcaacaaaaacaacaaaacttcttatgttgaaaatctggaaaagaaatgcttgaatgtggatgaaactgactgtaaaacacatcttgttcccctgttcacacactcactatgccagtgggatagagtgacccctgtcacggacaaaattttgaaacccttcattctttcaaatgtagtaatgttactggtggagggtgtccaggttcttggcatcttgaacaaacaatgggacaaaacgcataaacaagcaaggaaggaatgaagggatttattgaaaatgaaattatactccacagtgtgggaacggcccaagcataggggctcaagggcctcgttacagaatttgtggggatttaaataccttccagacgattccattggttacttggtgtatgccctatgtaaacgaagaggatgaagtaagttacaaagtcatttactcggtgtacaccctatgaaaagacatttcctgtcatagctgaagtgttcatccgctttatgttccctgcctccagaccctattttcctgccttagtaagaattttttttttttgagacagagttttgctcttgtccaggctgtagtgaaatggcacaatctcagttcactgcaacctctgcctcacaggatcaagcaattctcctgcctcagtctcccgagcagctgggattacagatgactgccaccacgcctgactaatttttatatatttagtagagacagagtttcaccatgttggccaggatggtctcgaaatcctcagctcaggtgatccacccgcctcagcctcccaaagtgctgggataacaggcttgagctaccgcacccagccttttagaaatatttttttaagctagtcaagcatggttgtagggggaagaaagtgttgattggctcaacaataacccacattgggttattgtgcttgggctattttttaattataatgaataaaatcaattactttttggagtaatcacacacctgtatattaagacatcatcattcactatcattttatgggtgttgttactattataacttactcaaagagactgtaagtcccagggagtagtcccttctaaacatacagcatagccttgaatgggtataagttgaaaatgaaccaacagtattggctggtgattaaggaaggcaacacaattgtaagtcacttccttagaaatacagagactcctaggaggagcaagagagactgccccgccttctcctcatggaacaaggtgtggcatctgcaaagtcaccagctaaacagacctggaaacctggagtttgtccagaaggggctttcaggagatgaagactctagacactgtctatgagaagcagaaaaaaatggagatgttgagctggaagaagaaaagccacagagaggacatgacccatgttaatgttagttagctaacattaaagcactcattcaactttcattgaacaaacatttgttgagcaccttctatgagccacttactgtgctagattctaaaggaaccaaggacaaagcagaggaccaggttattgcttctgcaaaacttagacttggtcaatgggtctggacaaaaatgttttctcagggagcaatagaatttgggttggtaatacatctctacgattctgtgggaatgaaagaggccatttgccttatcctttcttaattcttcatctttatgtttctaattaattgtgtagaagggggttggttggttggtttgttggttggttggttggttggttggtttttgagacagagtcttgctctattgcccaggctggagtgcagtggcacaatcgtggcttattgcaacctccacctcccgggttcaagcgattctcctgcctcagcctcccaagtacctgggattataggcacacacagacacacccagctattttctattttttttttttttttttagtaaagatgagattttgccatgttggccaggctggtctcaaactcctgacttcaggtgatctgcccaccgtggcctcccaaagtgctgggattacaagcatgagccatcacacccaaccttaattgcatgttttttaactccctcaagaaaaggcagttacaccccacgtgagatgtgcagggataggggatagagcaaaggctttactgcacagggtagtagcagccaacctagccctgggagtcaggaaggtctttcctggggaatgaacagtgaaatctccactctgagatgtggaggatgcagaggaactcatcagaaaccatggtcattggtacaagggtcctcggggggcacagcaatggatgaagcctagaaaaagaatggatttggccagtgctaaaactgcagctcttgctagctagagtcatacagtccagaaggggtaggtgggggaatacataacagccctagagctggaggtcagtggattctggttctgccttggccttgacttagctctgggactttgggcaactcactgagtctcttcagaatcagcttcctttcctggaaacatattggtgggttaaaccatctctaatctcctcttccccctgacctctttatggctcaacaccttacatcagaaaagttaacattttaggccaaaggctttgggaggctgaagtgagaggatcgcttgaggctaggagtttgagaccagcctgggcaacatagagatatctcatctatacagaaagtttctaaacattagctaggtacggtggtgtgcacctgtagtcccagctacacaggaggctgagggaggaggatcttctgagtccaggattttggggctgcagtaagctgtgatggcaccactgcactccaaactgggcaacagagcaagacaccgacttaaaaaaaaattaacaaataagctaaaattttataaatctttctaaataacagtataatttaggttaagaaccactgctctgggattctatagcaattaaaggctcttttgcctttttattcttaattctacactgttatattcctatttaagcattctttccctcaaacgacgttttctcctaaagctgcagtccctgtatctgtctgtttccccccagacccttcgggaacgtctggcagtgacactctttgcatgggactgggttttacagtagattagagagaatcattttcaacaccacagggacaaaccatatctcattcaaaaacaatccctaggcatgtccctgagcctccgcagccatcaatgggtctgcagagctgaggtttcctttctgactccttgaaaggctcacgcaggacaagtaacccctgtggcttatcaggcagagaccagcattatcagacgcttaacggagaagccagagagtagcaggagccctctcttgtcactcgtcacctcttgattaccattctgagccaaaaccacacaagccactaaatgcagtgaacgcctttgatgaaagcagggcgtagtgagtgaaggaggtagagcctcattcagtcctgtgcagacccggctgagcctatggggattgcaagctggaagtcctccacaaatacatagttctctgcatgagtgaagtcatctccatcttctcaccaagtttgaaatagggtgttattgttacatatccctcctgtctggaaattaaatgtattttttttcttggagagaaaattgttaattctcactccatgtcctggcactgaataataattattataatccttttggttaatatttattgcatgtttattatgtacctggctctttgctgtatgattttcatggaatatctaatttaatcttcacagcaaccttatgagagtatttatgcccatttgatagataagcaaactgacacaaagaaagttcaagttaatttgcctctatcatagcactagtaagtagcacagctaagatttaaactcacaacagactctgaccgcagatcccatctctaccactacagcctactgccatgttgcctgctgagaactgaaatactgaaagttataaatattttgcctaagttaatattcgggaatgacttagaaccgctaatagaaactaggcctccagctttggggagtgctgttccctccctactgtcccccaattttttcaggtggcaaaataagcctaaattccaggttttaaaccagttgttctggattttccttccagaggtgatgttggttcttatcttcataagttggttttcactctggaagggacaacactgctcccccaccaggctctaccatggcaaaccttcaaggtgcagcactcgggtaagcaggtgacccagggcgtagtaggcgggcagctctgcacctgccaggtggacacaaagggtgtccaggtagcacgctgtacctccagctcagggtggtcttcagcaaggactcagcctggagaacacacggcaagttctccagactggctgctaagcattccatgcagaaagagaatggagcctgcacaaattatgaaacatggaactgtcactgtgatgatatgattatggaaaatttacattttatatgtcaagtggcagcttaatttaaaaataaaaaactcctgcaggctaccatcccacaaataatgtgtggcttgctgtgcagccaaacacgcttacaaataataaggaaataaaacgtgagaataacaaaatggtttggcgcaaaaagaaaagggtgccaagcgtgtccggttactttcagatcaatttctaatatgccaccaaatgctcaagcatgtttggaacaaactggaggccttattaaactgagaattccatgtgacattatttcaaggaggcctcctgcttctcattattctgttgcacgtctctgaacaggcaggaagggagaggaaaaaggaagctggaagaagtcccctgtaacttgtgcccactgggccgtctgtgctggctgagtggcccagccagcccctagcactggggcagagggaaaagggatggggcatggctttcagcagtatctcctctcctgcccagggacacccccacatatcctcagagccactgccagccagccttagcacaatgccaaatcacgaacaggccattaaggagaatatatgatctccatttatcactgactgtaaaaagaaatgaaacagagcagctaagataaaaaaccaactgctagtcttctagtaagggtctttatctttttaatcccacggctttaaaaaatgtgcatgtagatcatttgccaggatataaatgccaatccaaatacttgtgtaaataatttaattttcattaattagaattcagagtttaggattttttctttaagtagaagagaaaaacaaacttggtttgctcagagtttgtttttctcttctacttaaaacaaaaaaaaaaatccagctaaagatatgttaagtaaggctgggcctttcagcactttgggagaccgaggtgagcggattgcttgagcccgggagtttgagacgagcctaggcaacgtagcaagacttcttctatgcaaaacatttaaaaagttggctatgcatggtgaaatgcacctatagtcccaactacttgggaggctgaggtaggaggattgcttgagcctgggaggtcaagactgcaaggagccaagattgcaccactgcactccagcctcagcaatagagtgagaccctgtctcagaaaaaaaaaaaaaaaaaggtatgttaagtataactatccttttcctcccagctgaatttctctttttaaaaatggatcattgagctataattttaaattctaaatacaattcagttgaattctgaaaatggactctaaaaataatatcaaggaaaaaaatctgttacatttcttatgagctccatcttaacttacttgctccaaatgaactcaagtttcttgaatttccaacactgccaactactttaaaatctaaagatcaagttgtgtttactttccatatgttgttatgaaatgatggccttctcttctgtatggacagtctctacacatttatagaatttatagttctggcatttactatcatgctagcatcacttgtggaagaggacagcctaatggaaataactagactctcgttctgatcgtttcctcatgcaaagggtattttttggctattttaaaattatctcccagctccttgtagaacttgtaccctgagaaaaggcagaaaccacttgaatccaattgaaatagaaaattcttaacttcttgagtgctgtaagaaaaatcagataccaatatatgattcagtaagctgtaaaaatcaatcttcaagcactgattcatgggcagccatgagtttagaggagtctaggttctagaaaacatttctattatagtagaatcagtttttctacatagatggttttacatgttaggggagcaaatgatgacactgggcttcattctcaaccgaattttttttttctttttttttgagacggagtcttgctttgtcactcaggctgtagtgcagtggcacgatctcagctccaacctctgcctcccgggttcaagcgattctcctgcctccacctccccagtagctgggattacaggtgtgtgccaccacgcccagctaattttttctgtatttttagtagagatgaggttttaccatgttggccaggctggtcttcaagtcctgacctcaagtgatctgcccgcctcagcctcccaaagggctgggattatagacgtgagccaccacacctggtctctaaactgaaaacttaaatgaaggcttgggttggactcttaggacttggaagaacttgaccatgttaccttcttcggaaaggtgggaaatccaatctgtaggaataaagatagaaattccagaagtgaccctcagtggaatttatttttctgctctaaaagtatgtgggtcttttaggcgtcttggctctgttcattctgtgtatccttgtacattgtcgtgtagggcacatttttcttatttgcttgtataaggacactgtcttaagtagaaaacatgaagaccagcatggtcagtgagccctgagtgaaacaaatgtcctgtcttactacaatcaaaactctgtttcaacagcagctggtggaccaaaaggaaatactgtgctttctgctagtgtttgaaggagatgacattataaagcctgcaagtaaatctctagcaggcttcttatctttgcctttggcttccaaattgctgactgatcattgggactgctgttgtgttgctttttattatggactggaattgccttggttattggcttggcactaatcaatacccatcacaaaagggaatagacaatgagatcatcatcactcctccttctcccaggccttaaggggtccagaaacaatcactccctacagtaaaatctcaactatctggaccagtctggctgcaaataaccccagtgatgagattttcactgattcttctaggaatctgtgttcacagttggccagggcaggctgacaaatgttttccaatacacagcctcattttctcttctgttccatttcttcacatcacttctagttaatgcacaatatacagaagcagaaacaggtcaaaactgggttgaatatattcccctcgtctgtggttttcaaatctctgcagccacgaatttcctccttgaaccacacacgatgaacagacgcctaataggagaaataaaaagttgatttccttgagcagcaaatttttagcacacaccaaattcaatcaatcatataaatgtactgattgataacttgaaattgcatgaggtaaagggaaattttatactaaaaaaaaaaaaaaaaaagagccaggtgcagtggctcacccctgtaatcccagcactctgggaggccgaggtgggcagatcacgaggtcaggagatctagaccatcctggctaacacggtgaaaccctgtctctactaaaattacaaaaaattattcaggcgtggtggtgcgtgcctgtagtcccagctcctgaggaggctgaggcaggagaattgcttgaacctgggaggcggaagttgcagtgagccgagatcacgccaccgcactccagcctgggcaacggagtgagactccatctcaaaaaaaaaaaaaaaaaaaagcgtttcactacaatagaaactttcactgggcccgatattgttacactgaaaatggattttaaagaaggaacagaaactaaaattaaagagcatttgcatgctgccttttgtgcaattaaatttttctgggaaagtggtttgaatgaccaagaacagaagataaagcgatcacattcaggaggttaaatttttgtacacaaaagtaaatatacaaatacttttgattgataatagaagtggtgattagagggaattctttgtttaatgtatatctccatctgttttggcccagtggtcaagatcaagccccaccattggtgcagtcagtgaatctaaattctgatcaggagtgggataaccccaccatccctgtgatatctcttccttgaaagaagtaagtgcagatcttgcccattgtgccaccacaattgcagcctgtattaatgaagaaatgctccagttgcattctctcttaagtcattcttttttttttttttttttttacacggagtctcgcactgtcaccagagctggagtgcagtggtgcaatctcggctcactgcaacctccgcctcccaggttcaagtgattctcctgcctcagcctcctgagcagctgggattacaggcgcccgccaccacgcctagctaattttttgtatttttagtagagacggggtttcaccatgttggccaggctggtctcgaactcctgacctcatgatccgcccgcttcggcctcccaaagtgctggaagtcattctttcaacagatgtctgctgaacacactatgacaggtactcttctaaacatcagggataacgccgagaataaaacatgtccgtgcccatgctcaggaaagttccattttaagaggacttagggtagacaggaaatgaacaaatataaaatctgtactgtgtcagatgataagtaacatcatgaagaaaaataaaatagtctaggaggatggagagtaatgtgaaaagaatgtggttttgactgagtggtcagggactgcttctccctgagagaagtccttcctttatggcaagagatgctatctgggggaagagagtcccaggcagagggaacggtaagtgtggtggcctagaggtgggagcatggcttttctgatgactgggaaaaaaaaaaaggaacgagaagaaaagtaggcggagataagatggggtagaaaggagatttccaaataatgttgattttttaggctggcccatgcactttggcttttactcttaattagatgagaagtcattggaggaacttcagctggagtgtaatgtgatctggcttacgattttaaaggattactcaggccatggcatggacaatagactgaaggaggccatgttccacagcctgagtcatttttagccattccctcattgggcaacagagacagcatgtccatgagatgggcacatagtataaaagtggggaataacagcttcaagatcttaaaaagcttcttcttaactttagatgcgcagctgaattgcagcctccactgcctctcccctagccacggcccaccccaacctgatggttgatccctctcacatggtttgtcattgacatgtggcacatgctgcctctatcattacattgctttgtgacttgcaggtttatgttgtctatctccccttcaatactgtgccaaccttgaaaacagggtggtgccatgtccacctctccattcctcctcagggctggcacatcacagagactcaaccatgcttctttgcatcagtgaattctttagcaatctgttaggactagctagcaccaataagatgaaatatcttaaagatcaactgcttatgtataagttaaacgtggcctacctttacaatagtccaggttttaaaaaaaagtctgatttttagcagaccttgaactcggtgtgaggcattacatgtggtatagctgttctttaaaaaaagtgatgaaaccttatggtaaacataggtttgggccatttgccgattagaataaatgtatcatagcatatacatgatgctgtgctaacatacccagtttatgtgtgtgtacgtatgtgcacacatgtgtgagcagaagcattgtttcctctttcatcagataagggacctgcccacagagcctaagtctaaagttgtggtactagtagtttggaaggagaaaatgtcgcactcaggaacacttgtatggaggtcgggtgctttagttccttgacatcataacggtcatgggttttgttgacacctgaagaagaaagctgtttatttacatatacactgtagattctccttagatgaaagggatttggccttaaacatcatcttcaaggaaacatatattgatgcttctaagattcaaacaaagagacagagatttttgaataacattgccctggaaaacctcactcgatacagaccatccactctagggtttcccaccatgctgtttattgtgtgtccaaggtgtgtgttccttattacttccttcaggaaaatacatgattaccctaggttatcattatggactgagcacatttttttctcatcccattttctcacttcttacaagcataatttaaccaaagaatgaactactcacagttgcttataatcctgaatggcaaatcaatcctgccatttgaatacagtctatttattgcggacaattactgtagtctgaagaagtcataaatagacagacatggcagaaatagtaaacatttctgtcacatgcctcattgtaatgattcagctctactatgtcctagagagagaaaaaaaaatttacaaagcacagaacttgtgggtttctaaataatttttaactggcaccatacgatgctaattttgtctcctgttttggcattttctagtcagaagcagtatgatcttgtcattagaataataaagcaggaattttgccctctagttcaagtagaggtttgagcaggaggagagctttttacttttagagcagactgcacttacctcatagctagaaaataatcacctgtaatctaataaaataaaccacctgtatactacttctatgtacttttacatgaccttaaaccagtcatttaacctctttgtgttttactttcttctataaaataagagttagaccacatatattttctggctgtataagatcatttaatacttgccataatacatgtactgacattgatcttaaagaccattgcctgtctttatttatgtagtaccttctatttttttttttaattcttcactgattatcaccagtgtaagggatagacagatgaattgtcactgtcatcatgagctggggctgcaataacaaaataccatagactgagtggcttaaccaacagacatttatttctcactgtgctgcaggctggaagtccaagatcaagatgccagcagattccattcctgatgagggctctcttcctggcttgcagacggccaccttcttgctgtgtcctcaggtggcagagacagaaagctctgatctctcttcttcctcttctaagggctctagtctcaacatgtaggctccacccttagaactcatctacacctaatcgcctaccaaaggcctcatctccaaaaaccatcacattggaggttaggacttcaacatataaatttaggggagaggaatacaatttagtccctagcagtcaccatataacatttctaaattcttaacatacacggagggaaatgttgccacaagaaacaatgtaaaataatgtaagagcactggaacctcactgtctgggtttgaattgcagttccgtctctcactaactccaagactccattccttatgtgctgctatggcctgaatgtttgtgttccccaaaattcatctgttgaaacctagcccccaaggtcctgatattaggaggtggagcctttgacaggccattaggttatgagggtgtgctgagccctcatgaatggtattagtacccttataaaagaggcaccagcccagacatggtggctcatgcctataattccaacacttcgggaggccaaggcaggtggatcactttagcccaggagtttgagatcagcctgggcaacatactgagacctgatctctacaaaaatacaaaaattagccaagcatggtggcacacgcctgtggtcccagctacttaggaggctgaagtgggaggatcacttgaggccaggaggtcaagtcttcagtgagtcatgattgcacactccactccagcctgggtaacagagtgagaatctgtcaagaaaggaagagaaagagagaaagagagagagagagagaaagagagaaagaaagagagagaaagaaagaaagaaaaagagagagaaaagtaaaaagccccagagaggtcccttttcctttctaccatgtaagcacacagccagaaggcagccgtctgcaaggggaaagaggagccctcaccaaaatccaatggtgctcgtgccctgatcttgggcttccagaactgtgggaaataaattgctattattcataatagaacccagtctatgtattttgctatagcagcctgaacagactaagacatctgtaaaatggggatgataggattaagtgaattatgataggtaacatgtgtggcgcagtgcctggcacacagtgagaattgattcaatgttagttaccaccctactattgaagcacctgtgtataactggtcacatgctaagtggaaggattaaaaaaaaataataaaagcaaagatttgaatacaaaaattggctttcaagcccaaacaaacatgccatgtgtacaaaattttggaataatagtgaatgattttataagccaagtgcaggacacatgtctaaaaagaatgttcccatgggagaacacagtgttgaatttctgacaccgcagtaatgacagggaaataccctttcgacacaagtggttttccactattcacctataagtgtgtggtggaattcaagtgctgtggactttggttgcaaaaacacaatgcccaaatttgtacgcaaccaaaggttgtattgtaatgtaggttcttactacctagaaagaattcctataatcaccttaaaaatctgcattctggatgaaagtatttaacacactttcaaaatacccaggtaggactgggtgaagacaggcaggatgtaaaggacaccttaaaggcattcagttcaagaacctcatcatagcttttgagaacaagattgtcctaaggagacaaaaacatggagttggggaggatagcattgagtcagtagctccaaagttctgcttctgccaaaaaaaatgcctacatgccagaggaatgttaaatgctggatctttttgttccatctaactggtttcgtaaagatttggagtggctctgtgattgttttatacctgatgactcttctcagttgctgtagaccctttaatactttaaaaatcttgctccccttctaagagacaggaaagatttaggactgtggtgggggatatagtttctgaagttctaattggcttctttgatggtccctattgtgttatgtaagctaggtcaggcgcacatgcaattgtgtttgtttgtttgtgtgtttgtttgtttgtttgttttttgagacaggatctgactctgtcacccaggctggagtgcagtggtgcaatctcagctcactgcaacctctgcctcttgggttcaagcaatcctcctgcctcagcctcccgaatggctgggattacaggcacatgccaccacgcctggctaatttttgtatttttagtaaggacagggtttcaccatgttggccaggctggtctcgaactcctaacctcaagtgatccgcccacctcggcctcctaaagtgctgggattacaggcttcagccaccgcgactggccttaatccaattttttgaattacttagaattttgaaataagtattcctccacttaattgctacattttaatttatataaaattaatttaatcctatacaaattaatttaaaaaatttaattttatatacattaaattcattttaatttgtgtatatataatctcactatgaagcattttctacactcttaagtccagtgatgtttctgaaggtttgaagatttttctaagttttctttctctcttggacccgccctgccaaattattcacactgttactacccagaaataaaatggggcacgtaattggaaaatataggcatctacttacttattaactcattagtaccatgatgactgaacagcttcttaagtcaaacaatacccaactgcagtataaacaaagtcacggacaactggcttgtttaaaacttatcgcgcttgagcaggagttttctttttaaccttttctgctaagagactttttttttcctacacatcaactgtacttattcatgccctctctgaaacccacatctccagtaattacaatgagtttagaaacaagtgtggaagaaattggaccatacgataccttcccctaggcatctaactagatgtcactttggaaattaagatgagcttcctaattctagaaagaagccaccagaccacagatgcctgtaaatcagctgtgaagacatcagatagaatcatttgggcataaataggaaattaggggggcatttgtcatttaaatatgtatttgaaagctttttttttttttcttacaaaaaaccattttgctttgttttataacagtattgactggcggggcatgatggctcatgcctgtaatcccagcattttgggaggccgaggcaggcggatcactgtggtcaggagttcgagaccagcctgaccaacatggcaaaaccccatctctactaaaaatataaaaattagccaggtgtggtggtgcacacctgtaatcccagctactcaggaggctgaggcaggagaatcacttgaatccggaaggcagaggttgcagtgagccgagatcacaccactgcactccagcctgggcgacagagtgagactctctctcaaaaaaaagaaaattgtattgactgatattcgtaacagacatgtagcagagcctagagctttgcacatagtacttgactgaaaattagttaagggaatgaataaataaataaataaataaatgaaccactctaacatcctgctttgaaagttcaagtttctaaaattctacgtgacatttttactgcttgttcataatatcagagctgggggctaagatgggggtcatttagactggagacgtcatttagcattcattaattcaacaatggtgtattgagcctagtatgttccaggcactgttcaaggctctggggatacaacagagaactaaacagaccaaagccaggcctgcaagaaacccacattctaatacagggaaacagacaatggacaaataaataaacatgcaatataggaagtaatgaaaacaaaggagaagaataaatctcagtgctggggaagagaaagcagttttaggtggagtgtctccttttcaacagcaggtcagctgaattctccgcactgggaaatgcctgttgactaaggtaatagtgatcactttttgtagagtgatttacagttgacagtgcgcttgcccacaccacatcctctgaactttcctgcagctctttgagatcctaatactccccgtgctatcagcaacaaaactgaggagcagaaactgatcaaagggctcacccaaggccatgcaccttgtgagtgccagtgcccaactgtggctcagatttcctgtcccctttgccgggtgttgcaaagagagggaccttcggtgccagccctgccaactggggaatgagaaagggtgagctgttgggtttgtgtcctgcttggttactcttttctgaagtttgatatttacagtccttgatttgtttgtttaccccctagagagaatgaaagtacagtgtgtgtatattattaaataaaatctgtgggccgggcatggtgactcacacctgtaatcccagcactttgggaggccaaggcaggtggattgcttgaggccaggagttcaagaccagcctggccaacatggtgaaatcccatctctactgaaaatataaaaattaactgggcatggtggtgcatgaccataatcccagttactcaggaggctgaggcaggagaatcacgtgaacccaggaggtggaggttgcagtttgcagtgagccaagattgcgccactgtactccagactgggcgacaaagcgagtctccgtctcaaaaaaaaaaaaaaaaatctgtgatggatattaagatagaaccagatagaagaattgggcagaattaaagaatctcccaacaatattaatatccgcatgcttatccctcctgtgtttgtcaatccgaatcacaccctagctaggagctgcataatttgtcacctgacttggtattcatcacactaaagccacttcttggtgatgagaatctttatcaggaagtatgtcatccctgctatattgaaacttttttaaaacactgttttgagagccaaaacttcggtgagcacacagagacaattcttttcctacttagaacaatccaagtataaaaccttaaagcagatttctctcacacaaagctttcgttttaaatgtgctcggccactgtttatttcaaagccatgtgagattatctttttcttctgtttctttcttttttggggggaaatgagtagaatgtttttcttcttctcctaaaaacaagcaaacaaatacaaaagaaataatcaacacatatttactgaaaatatggtatggttttagtgaggtgctgacgtcagcatgatcggcatgagacactagagaaaaatgtagatttgaatttacagagagatttgaattctacattgtacattgaatctacaaagagagatttgaattctagctctaccacacactggggaacctcaggcaagttactgagccttggagcctcaggttcctcttctgtaaaatgggtataacacctgctctgaactgtcattatgggactaggtgaaatagagactgttcaacatctggcatatgttagtcaataaatggcactattactacacactagttgggcctttgctcaagggcaataaagaccttgacctgggctgggatccccaaaatccagaaggggaatgggcagggctgggccttaagagtagatgtagaagcaaaggaaaagtgagatccaggatcctcggagtgtgaggaccagccatagacccaaggaagaagatgggaggcaaagccaaagtgaacaatctacagcggtgaccaggcagatgatggagctgagcggggctccctgagacccttccctggtggggaagagagaatgaaacctaaagacttcacagccagagccacggtcaggcagccacagggtgtagcagggctcatagatgagatactggcttccatcttgagagattttgcagttccagttgacctgccgtcagtgccattgcagatcattgcgacttctccaagtctgtgccttcagcagtggtgaattcagacaatgttgtgtttgttctctgaatacaaattactagtgttgggaaaccacagtgcctgagccaaccccccaactggagctctttgttcgccgtgcctggtccctgactccaagagccagaagggacctcagaggtcaggaggccaaccgcccacagggagcagggattccctctgcagcgggagcacaggtggtgcccagcctctgcaggaacactccagggagaggacactcacccaccgcttccagaaagccacctccttgggtagcagctctgagtggcacaaagccctttgtgcagtcaccacaaaatctgcccactttttttttttttttttgagatagagtcactctgtcgcccagtctggagtgcagtggcgtgatctcggctcactgcaagctccgcctcccaggttcatgctattctcctgcctcagcctcccgagtagctgggactacaggcacccaccaccatgcccggctaattttttgtatttttagtagagacggggtttcaccgtgttagccaggatggtctcgatctcctgaccttgtgatccgcccgcctcagcctcccaaagtgctgggattacagacatgagccaccgagcccagcctcacttttaagccccgcttcctgaccctttccacctagttggtcctccttccatgcaccagcacttaacacatctaatctcgaagaaaaccgtgctccagttcgctagcccccgccttcccactgctagagctattcttttggggactagacatcaccattcccttcagtcattgaagctggacctgaacacttcctcatcctaaatgctctcgcctggatttgatgaaatttgcaaacatctgtcttaaaatgtagccatgaaacagaacacagtactccctataatgttgttaatatgtcggtcccattaactcccagtgagaacactgtggtttgttgtggtttgctgttgttgctgttgttattgttgttttcgaggccaggtcccactctgttgcccaggctggagtgcagtggtgcattcctagctcactgcagcctccaactcatgggctcacgcaatactcctgcctcagcctcgtgagtagctgtgattacaggcacacgctgccatgcgcaaattttttttattttttgtagagatggggtctcactctgttgcccagtcttgtggtttgtttcatatactaatattgcatgagctttggggtccaccacatcacacttcagcctcctattcaggttgctgtcagtaacattcaggttgtatgggttttgtttttttaatgctgcttttctcctcctacatgtaagtagctggtctgtttaaatcttcattccacattgttaaatctatcagtctctctttgacctgttggaatcttgcttttaagctaagtttttgtcattttaaaaattggattttataaatgcaaccaagggataataaaagtatttatcagtacataaaaataaaaggcctgtggttcacagagatcaatgaagctcttattagaattcggctgttattattgttaataatattgaatgccactgattattgaccttgttaataatattaatttatcatagtgttggtagtagtattactgctagtactcatcatcagcatattggatacgttattcataacttgatatattatttcagaaattgacattccttgtatatggttattttacccgttagaagtctgcctatgataagagtatacgttttcatcttgaccttgagtagatcatgagaaactttgtaaaatgtttcactgaaaccacagcatactctgccctgtaatcctcccaaagaggaaattaggccaacatgcatccctggctttagacaacagaaggcatctgcccgcgccttcctcttcttgagcagaggccacagctgaatgactgcccagggctttgacctcagctgcttcctttccagggagggagaggggtgttggtccacaggcagtcaagcctcacctgctagccaagttcacctcccagctcttcccccagtcactatggttgtctcttagaggcctctgcgtctccccgtcctctatcctgagctacagctcatatccgcctgatagtctatgtacttatttagtatttgttcattgtcaaactcccccaccagaatgccaacttcagcagtacagggacagggactttgggagtctattttgttcactaactgtatccttagtactagtcctagttactaagtgactaaggataccccatttactaaggataccccatctactagtactaaggatacagttactaaggataccccatctactgaggtcctggcatgttgcaggagctcagtagatgtttgtcatatgaatgaaggcggatcacgtgcctcaggagatgtggctggacccttatgtgaatgtctcccatccctttagcaccaaagaccctaatggcagagaagatcaaaagacgtggcctgaagcctggggatggtggcctaatgaaagcaggatgcttatgtttattgttattattgagatctaattcacaaaccatacaattcatctattaaagtacgcaattcagtgatttgtagtatattcacagtcatgcaaccattgccccacttttacaacatcttcaccaccccaaaaagagatcctgtactcataagctatcatccccacacacattaactccatccctttgtccctaggaaaatactgatttactttttctatgtatagatttgtctattctgcacatttcatatcagtggactcagacaatatgtggtcttttgtaagtgatttgtttcagttagcataatgtgtccaaggttcatccatgttggggcatgtatcagtacttcatttcttttctgaataatatcctttttttttttttttttaaatggagttttactcttcttacccaggctacggtgcaatggtgtgacctcagctcactgcaaactctgcctcccgagttcaagaggttctcctgcctcaacctccggagtagctaggattacaggcacacaccaccacacccagctaattttgtatttttagtagatatggggtttcaccatgttggtcaggatggtctcgaactcctgacctcaggtgatctacccgcctcagcctcccaaactgctgggattacaggtgtgagccaccacgcccagccaaataatattctaggcaggcggatcacaaagtcaggagatcgagaccatcctggctaacacggtgaaaccccgtctctactaaaaatacaaaaaaaattagccgggcatggtggtggcgcctgtagtcccagctactcaggaggctgaggcaggaaaacggcgtgaacccgggaggcggagcttgcagtgagccgagatcgcgccactgcactctagcctgggcgacagagcgagactccatctcaaaaaaaaaaaaaaaaaaaaattctattatgtggatacatcacattttgcttatctgttcatcagcggatggacatttagtttcttcctgcttttgcctattatgtgtaatgtcactatgaacattcatgtgcaagtttctgtggatatatgtttccatttctcttggttatatacccaggcatgggtcacatggtccctctgtgtttaacattttgaggaactgccaggctgttttccaaagtagctacaccatgtcacagtcccaccagcagtgcacaagggtcctgatccctgctgttgtccccaacactgctactgtaggaagctgctttttagtctcattgtttatcttacattccttgtaaactttgcattcttttctataatataaagggttcattgtcaaagttaaaatatttactgttaggaaaaataaaggaaaaacaaaaatgagaagcatttggattgtgcatattcattttgggaaactgggttgcattaaagaaaagggaagaaagctgtagctgtcagattcagtttctagaaactttctcttctctgtttgggtgcttcagtattttgaggacctagaccccataaatatgtgggcacagagtaaaaggattttctctttgctttgtatgcttgtccagcagaatcactaaagagattccttgaggccaggcacagtggctcatacctctaatcctagcggtttgggaggccgaggcaggtggattacctgagctcagcagttcgagaccaccctaggtaacacagtgaaacccagtccctactaaaatacaaaaaattagccaggcgaggtggcacgtgcctgtagtcccagctactcaggaggctgaggcatgagaatcgcttgaacccgggaggcggaggttgcagtgagctgagattgtgccatgcactccagctggggcaacagagcaagactctgtctccaaaataaaaataaaaagagattccttgaggtacaacaaaactatggcccgtttttaggcttctgcaggtgaaaatgtcaaaaaatgcatttccttgcaggtggtgaactgaatgaactctgatttgctagtcaatctcttttagattcttgagtatctaaaaccgttttagtgaagtgagataatggaggctgttttctatatttttaccccaacactataattttcataatatgaactgaacttgaggttacaaaagattaattgttcaccatcaacatttgcattcatttgcagagctttacttttttggaaatgatcttatcatgtgcaggaaaaaacattcctagctttcttttgccctggtagactgtggaaattcagctttgaaaaaagatttgtgagccactcttcatgattaatgttatttatttggatttttcaaagctgtagtcaggatttttatttgtttgtatttgttctccttgaagaaaactagtaattcatctatgagtttgaaaactccacatagcactttccctggctgagaaggaaaaggatatacctagaatacaattttgaagtcaaatttcagaggcagttttcattttcttaataatttcccttaaaagacaagttttcaaaccactagactttttttttttttttttttttcatgaaactcccagaggcttaacaggatggtgttggtgaatgatgccgtggtttctggtacatgcacggggcaaaatgttccagtgcagctgtgtgtcattgctgggtgccagctgtgtgcataattgtttattggttccagttgatattgtgctcaataaaacactcacatatttgtggaaaaaaaatctttatcagttattttcccatcaaatcctttgcaaattaaaacatattcaacaattttcatcagcatacatttagcaaaagaaaagtaaatgaagaaattaacaaatctgctttctgcagggtgaagaaccaagttagcctgtgtcccagttaaccatcgctaagtaacaaaccatcgcaaaatataatagcttaaaataaccagcatttatgtagctcatgattgcatatgttggtaatccaggcggggctcagcaaggcagttctcctctccctcatgcatctgtggtcagttgcaagtcaagtggatgacactgctgatgtcagctgggttctctcccctctctgaggcctgggctgagataactaggctgcctcagctttgatccacctgctctcatcttccagcaggttagaccaggcttgttcacatggcagctaggcagtcttccaagagatcaaattgaagcatcaaagtcctttggagacttaaattttgaactagcatattatcactcctgcattttattggccaagacaaaccagaagaccagcccagattcaagtggaagaaaaacagatttcacttctagacatcacttcacagtcacattacaaagccgtgaaacaggaaggagtgagagatagtggccattttttacaatgtttcacaacatatttcatggctgtccaagaatgtattaagaacacattaaaataggccatgtttttgtatcctttaattacagtgcttttttatatacctcaaactcgtcttttggacttaaaagagattggccatgtctataacaaaggactttttcaaattttctcttttgacatgagttgcatgtttctggcaattctgaagcagatcttaaagaactctccaccacttgcgtttgggttttcattttagttttcttaggcaagacttcctcctttttagttgcaaaataaataaaatggtttttcttcaaaattttttattatgagtttttaaatggcattgcgacagtgttaagtttgggcaatttctgtttattttattacacaagagacaccatggtttagaattgttcgtacatccataataattaactcatcttttaaataagcacctaagaacatctgacaccttttgcattcataattactgtttattttgaattcatttgtggttatcttatgtttccatgctggtctcaactgttgactcaaaaatcaaaattattgcaattgcaaaggtaaagacagaaaggtactgtgggtgttaagaaatgggaacttttatacgttactgatgggaacggaaatttgttcaattacttcagacagcaaattggcaatacctagtaaagacacacaccctacagaaagcaattttacttccaaatgtttatcctagagaaaatctcacacactacaaaggagacatgtacaaaggcagtccttgcaccctttcattcatttattcatttgctcggcaagtatttattaagcacatactgtgtctcacatagcagaagacaaaacaaaaatcctgcctgcaaagggcttacattccagaggaaaaagatatgtaatgagcaaaataaataaggaaatacattgcaggaaaactgatgataagggctgtgaaaaaacaataagagagtgaaaaagaataggaagtgttggggaggaggctaaaactgtaactaggctgtacagcgatggcctcactgagaatgtcacaattagagttgcagatttaacaaatacaaatataagattcccacataaattttagataatcagtgaatcttttgttagggtaagtatatcccacatagcacttgggggtatacttatactacacatgaacttgttgtttatctgaaattcaaatttaactggatttcctgtcttttctctggcaatgctactgataactgagtaaaaacatgggaagaagagggagcaaattaagtggacatgttgagaaggtcatcaaatgaatgaattcccggaagaggagcttggcaggcagaggaaccgctaggagcaaaggccctggctgtttgtaaataatgaacacttagacgtaacttgtctctcagctggagaacgtagacacatcctgtggtatatttgcaccatggaatccaataaatggatgaaattcaaaaacactcatattgataaatctcaaaaatgtgatgttgaatggaaaataagttgggaaaagataactctgttctagctgcatttctgtaaagttgaaaaacacacaaaacagtgtatactgcttatgctacattcatatgcaaaggacagaaacaaatagggaatgctagagacctactgtaggagactatcaccttctggggagggaatggggagggaaggaaaaaggatgagaagcatggctttagcaagctctctctctcttgctttcaataagcaaagaagataaagtgtttaactttaatggtagttacatagcagtctaatatattttctgtcctttttttttttttttttttttttttttagatggagtttccgtcttcttgtccaggctggagtgcagtggcacgatcttggctcactgcaacctctgcctccagggttcaagcgattctcctgcctcagcctcctgagtagctgggattacaggtgcccgccaccatgcctggctaattttgtatttttagtagagacggggttttaccatgttggccaggctggtcgtgaactcctgacctcaggtgatccgcctgcctcggcctcccaaagtgctggcattacaggtgtgagccactgcacccggcctatctgtgcttttttttttttttaagtgactttaaaatttaaaaacccagaattttaggtacttttgtattatgaggaactcactatactaggaagcaacttatgagtgtgtaaatatttgatctagcagcaactttccactgatcctggcaggtgacagctctcagtgaacagcgctcatcacctaaagtgagaggctgtctattctcattgtgaatgtccctcagagtcactaggagccattgggcaggccaggaacttactgcctacttcctcgtctgtcaggtggaggtgttgacacaagccttgaaccctcaacaaataagacaacagccacatggtgcctgtaagtattgtaagaatcggcggttgtggcatttcattttgtctgatctgggacccgccgtgggtttccctttgaactgaacattgcaactttctaggtatagacttttggcaagttacttaatgttcctgagcctcgatttctggatctatacaattggaattaacaagacctgctgtgcagtcttgctgcagattatagataatgtacataatatgcacatcaccgcccaacagataatagatattattattattactgttattattagctgatcatagtttaggttataaccatttccaaaagaatttcctttgtaagaacacacttagacaactcaggtgcattttctatttttctctacagactaccttctgatgtaaaatataattttagttctaactcctaaaaaatggaatgaaatgggttctccatcatttttcggcagtgttgtcactgacttgctgagtgacgtagggctgcaagggcctgagaaggtagaaggaaccagaagttgacctatgggcgtggataatactgcgccacacagttgaggatgagacacagcaacacctcaggggtaaatgctgaagttcagagcacgcacctttagatgtgactgacgggcattcccatgggaaggcaaacagtgcaccctcaattgctgaaaggttgtgggctatttaaatgcatttgaattcactcctaagttattcacacacgagcagggcgaacatctcggcaaggagcatacacttggtgcactcagaggacagggatggaattggaatgtagggcacagttatttaggacaagactgtttcctatgattaacttacaagatgtaattcacccggggtctcattaaagctcacagcagttacctatgaggctcaaaccaaggattgacatctaacatagtggagaagacggtattgtatacagacaaaagctgccagatttcacgcccttagtggatgctgataatggaaataataccatagcatatattttatttaacatgtactctgtgccaaaaactccctctttatacattacacaatgcaaccctcatagcatgcctatgagtaggaatctgagatgaagaaaaggttagaactcattagcctaaagttacaccactagtaagctgttggttggtggttcaaacctcaggagtcagctaccatagcctgtactgctgaccactgtgttattgcactctgtgtctttgggcaggaaagtggattaaacaccagtttcagcctgctatatagacagataaaaaaaggcccttctggaagattcaggctgacctgttcaaagtcacacagggagaaggagcagaatcagagatgtgactgtgattgccatgagggttacgttgaaaatcaacagaatccataagtagctgcattctaatacacaccaagaaggatgccaaggtcccagactgggggctgcagaggctcagcctatgcctcatcatggggctcggccctgttgacccagaacatttccaggtgtctgcagagctctgctcgggtgccatgattctgatttcaaggggtggcagaaatgttctgtggctgaacatgatttttggcgcttaaacttccaattctttcctcaaggttcccctccgctcctccagaaaccaatctgagacttcgcactgcaagccctttatcaacccatgcctccttttgctcaaaattaagccatgacggaaaaaacggaatgcactttggaggtcttaaaaattgacttggatacaaatctgcttccttctaggtacagacttttggcaagttacttagtgtttctgagcctccatttccgaatctatacaatggaaattaacaagacctacagtgttgtgttgccacagaaattatagataatgcgtgtaatgtgcatggcactcaacaaatagtagatattattattattatcactattattatgagctgatcatattaatagtttaggttataaccatttccaagggaatttcctttgtaaagagcacaaggggcattctctgaagatttgaaaggtactttcctttctcttcactatgtatttcctcttctactgagaacttgatttcacttttgagaaaaaatctgtgcctaccttcccaaaaccacacaaagaagttaaaagtacatgaacaaaggaagaaccttagatctctaagagccaacatgaaaacaattcatagtttacaaaggagagactagggagagatggaagcatgtctatttcaagatctaatagaaactagacctgctctattattaagagcttttattaggccccctcaaaagctttcaggagtcttcaaaatgcattgcaggtatccccaaaaaagtgggctttattgttggggccagtgttgcgactggtccttgttcatttatgagaaacagtggtcacagttccagactttaaggaaggctgccttccttaaaactgttttaaggagttgcgtattaacactggtcaaatgctgttttcttttcttttttttttttttttttgagatagagtctcactctgtcacccaggctggagtgccgtggcacaatctccgctcactgcaacctctgccttccgggttcaagcgattctcctgcctcagcctcctgcgtagctgggattgcaggcatccaccaccacactggctaatttttgtattttttagtagagacagggtttcgccacgttggccaggctggtctcaaactcctgacctcaggtgatcctcctgccttggctttccaaagtgctgggattacaaacgctgctttctaccatcactgactcccctgctttttattagcaggatggatttaactataaaaatctattgggttctgatcacaatgcttggctaaaagaaagtgataaagtgaaattaaataccatacaccgtgtacaggtgaacacattttgaggatctggaatacaagaaaattattaaaacacaaagcactgccgtgatgcctgtctttgaagaattcttgacggagagcagtataaagacatatgcaaaggtggtgatgaaaacgtgctgagcatagagatgcgcatgggttatttagggcatgggagaggggaacctcggggaaggcttcccggggaatgaggcgtctgagcggagctggaagagtgagtgggagtcaaccaggtgtcagggaggacgggagggttttccgcgcagatgtacggccgtgcgaaagcaagaaggcaagaagcacaggggcctgtaggagcgttctccttggctgggaggcgaaacgccagcaggaaatagtggttggtgaggccagacagacaggcaggccctattttcaactggactgtaggcaaaaggggacaaaggccacttccgcatctgttcactgtcatgtcccagcccccaccagtgcctggtgatgaacaaatgccagggagcttcagcttcactcggggtgtgagagatatttagatatttcagaagtggagcgacacgattatatttcattttagatagggaggcaatcggttaggaagcatttccatcagaattaagttcttaagactgcaattctacatccaagaatgtccattcattcattttattcactcatcagacaatttttttttttaagagacaagctgtcgctgtcacccaggctggagtgtagtggcatggtcctatctcactgcagcctccaacacctgggttcacaccatcttcccacttctgcctctagggtagctgggaccacaggcacatgtcaccaccacgccctggctattttttttttatttttatttttttagagatggggtcttgctatgttgcccaggctggtctcaaactcttggcctcaagtgatcctcatgcctcagcctcctgagtagctgggactacaggcgtgcatcactacacctggctaatttttatttaaaaacattttttgtagagttggagtcttgctatgttgcccaggctggtctcaaactcctggcctagagtgatcctcctgccttcaccttccaaagtgctggaattacaggcataagccaccatgcacggcctcaacaaatatctattgaatgtttagtatgttccaaagactgttctaggctcaggagatttagcaaaaagccaaatggacgtaaatccctgctctcgtgggaaggacaggtaataaaacaaacagctaagtaaataaatggtacagtctgttagaaggcaaaagaaagaatggagacaaactaggaaagggattaggaacggggggagcaggaggtgggcaggtgggaggagttgctatttttaagaaaggtggttagaaaagatctcactaataagggtacatctgagcagggacctgaaaaggtaagagcttgattcctactggtatctggaggagggccttccaagcagatggaagtgcaaaggccctggggctagcacaagcgtaaagacaacagggtgcccggagcacagtaaaagccaagaggtaggaaaattgtgctgagtgtaagctccaatcagcaggatcaatatctttggaatctgttaaaaatgtaaattattacaccctaacccaagctaagaatcagagacctgggttggaaatgggagtgggggtaacactcaagaatctgttgtttgttgttgttttttttttttttttttgagactgcatctcactctgtcatccaggctggagtgcagtggcgtgatcttggctcactgcaatctccacctcccgggttcaagcagtcctcctgcctcagcctcccaagtagctgggattacaagtgtgtgccaccacacccagctatttttttgtgttttagtatagatgggatttcaccatgttggccaggctggtcttgaactcctgacctcaagtgatccacctgcctcggcctcccaaggtgctgggattacaggtgtgagccactgtgcccagcccaggaatctattttgactggtcttccaggggattctcatgttggctcagttggctcatctctgtcactctctctctctctctctctctctctctctctctccagtattttgcctaaccatcaatttccataagtctaaatgccctccatgtatagatatctccaacttttttattttccatgcagagagatctttctaaatgttaaccttttgtacccaatcccatctcaacaaataagcctaggctggcacactggctcatgcctgtaatcccaacactttgggaggccaaggcatgaggatcacttgagttcaagaccagcctgggccacatagcaagaccccatctttacaaaaaaatttaaaaataaaaattagccaggtatagtggtacatgcctgtagccccagctactcaggaggctgagacaggaggatcacttgagctcaggggttcaaggttacagtgagctatgatcacgccactgtactccagcctggatgacagtgtgagaccctgtctctaaaacaaacaaatatacaaaaaattaaatagcctatcttcttatttagtgaaatcagaatcctagaaatttgatagcctgaaccatattattatttattaacagattatttgctattataatttggagtaggtctgacttctatggggtggcaggagaaatcattgcctcccaagtcatcactgggggccagcttcctgccctgtccccgctctgagaagctcactcgcctgttctccctggggctgggaggtcccggggctcttacttcctgctctggcccatcctttcaatatagtcctattgctcacttgagagattggtagattgatgtcacttgcacataaaccttcacaataattgatgttacaataggaaaaggaatatttgctgaaaatcttttccattctttttttttttttttttgagatgaagtctcgctctgttgcccatgctggagtgcagtggcatgatctcagctcactgcaacctccacctcctgggctcagagattctgctgcctcagcctcctgagtagctgggattataggcacccgccaccatgcccagctaatttttgtattttttgtagagacaggtttcaccatgttggccaggctggtctcaaactcctgatctctggttcaaggcagatccacctgccctggcctcccaaagtgctgggattacaggcatgagccaccacacccagcctccattcaattttacaaatatttctgccttagctgctttttgcagtgaagcaatgggccaataaataaattataattatttgtgctaggcacgagaagggacgcaataccacctaatactcgaccatgcctgagggttgaggaacacaccttagggttgagagcaccggctctggaatcagactgcctgagtttggtaactggcagtggccgacttctcgtctgtaggatctgagatggcttatcacacctctccctgtgtttccattccctcacctataaatggggttaacaatagtgcccatctcagagggctgttgcgaagactgagttattatacgtaaatcacataatcagtacctggcacttggtaaatgccaactaagttttaaccttcttattttattttattttattttattttagagacggaatctcgctctgtcgcccaggctggagtacagtggcgtgatctaggctcactgcaacctctgcctcccaggctcaagtaattctcctgcctcagcctcctgagtagctgggattacaggcacctgccaacacgcctggctaatttttgtatttttagtagagatggggtttcaccatgttggccaggctggtctcaaactcctgacctcaattgatccacccacctcgacctcccaaagtcccgggattacaggcatgagccaccatgcccggccctatttttattaatacatatttctgagtaaataaacaaaaaagccttagggagagagctagccgaaggtacttgagtatacttagaatgttaaccaattttataccgtggtactcgctggaatacaggtactcccaggggctccaaggtactttaattagcttgtgatgttttgattgattcttgtctgtgtttcaggaagccttgctctgggtttttgttgccatgagttgcagtctaaatcatgattcccagccaagaaaaatcataaccaactatctaatgtaatgagaacacaacaaaactataaaacttggttatttcaaatgacagagctgttggtgaaaaaataacaaaataaaacacagccattggataatttcttcatacaccccggggaccctggttttaagtacttgatcgcaggccacacatgacaggagacggaattatccctttttgattgaagtggctcagaattggcctctaattgacctgggagtaggaagcaaaaaggattgggtataaaaatataataggattcacttgaaaccagccaagcactttaacctgccccagagggatctctctgcatttttaacacctgcttgacatatgaaaggaaaacttgccagtgttattcactataaacacagaaaatggaatgtaaagctatgtccatatggtgcaggttaggaactgatggaacgacacaggagcctatcaattcccaggtgtcttccgctgtaactgggactccatccacagttaatagtgaatacaaagtaattctgtggccatgctgcctgtgaccgccagtgtatttcacatgtacagcctgtggcaggcaagcatggacaataagagctcaagcctccaaaagacgactctgggttcaaatctgatcagcagagtcccctcaggcatgtggcttcattttcttttttgtcatagagacagggtctcgctctggcacccaggctggaatgcagtggtatgatcatagctcactgcagcctcaaactgctggactgaagctatcgtcccacctcagcctgccagaaaaagtgctggaattacaggtgtgagccaccacacctggcccacttcacctttttacatcccaagttccttgtctgtagaaaagggacagaacagtttccacctcataggaatcccatgatgattaaattaaagtttggaaagctctagcactgcctaatacagagtacatactcaccaagggacagaacagtttccacctcataggaatcccatgatgattaaattaaagtttggaaagctctagcactgcctaatacagagtacatactcaccacaatgttagttgttcactattatcagttgtgtggttttggaaacaatatgtgttgaacccctagtcttcataaggctggcaatagatattatcaggcttattttattttattttatagacagggtcttgctctgtcacccaggctggagtgcagtggtgcgatcacaaacttctgagctcaagtgatcctcccaccgcatcctcccaagtagctgagactacaggtgcaaacccagctaatttttaaattttttttgtagagacaggggtctcactatgtagcccaggctggtctcaaattcctagcctcaagtgatcctcccacctcggccctccagagagctgggattacaggtgtgagccactgtgcccagctcccaggctcattttaaaggtgagaaacagcttcaataagaggcttattcaaggttgccctggaaaaggagtccaagactgcccaatggtattagctccaaggacaggattacacaacccagcttcaggtcctcccttaccttgtctcctgtcctcagctcggcaagtacacaaaggcttgagtgggagagatctttctccaccaatagtgagaccctagcaaagatcagagctaagccatcatctcttaattgtcccatgtatgctccaagctggtcagagaagctgtgactcaaatcctagagttaagaacctggcacttgttattagtggagaagacagaatttttgctccatcactttgggcatacacacaaaatcacattaatttatttctctaaacccaattaaatttgactacatcctcattcattgggatggcaagaatttgcatcctcttccctctctctcaggccaccttggacctctaaacagggaagtggtctcgttatcaattttttatttttttatttttttgagatggagtctctctctgtcacccagactggagtacagtggcacaatctcagctcactgcaacctccacctcctgggttcaagtaattctccacctcccaagtagctgggactacaggcacgccccaccacacccagctgacttttatatttttagtagagactggctttcactatgttatccaggctggtctcaaactcctgacctcaggtgatccgtccaccttggcctcccaaagtgctgggattacaggcatgagccaccgcacccagcctcttgtcatcaatctaatagagttgccactaaggtgcttggggcaaaaggactggccgttcattttgaggccagactccaaccctcttaactgaactccaggatcctttgctgtgcctaagacacatatcttagcttttttttttttttttttgagtcggagtctctgtctgtcacccaggctggagtgcaatgacggatctcagctcactgcagcctccgcctcccaggttcaagcaattctcctgcctcagccttctgagtagctgggatcacaggcagctgcaaccacacccggctaattttttgtatttttagcagagacggggtttcaccatgttgaccaggctggtcttgaactcctggcctcaggtgatccaccctgcttggcatcccaaagtgctgggattacaggcttgagccactgtacctataatctaaggcctataatgtttaattctaagacacatatcttagaatttagctcccaactcacaggccatgcactggcccatcaggttgcctgcccactcttgaggcactcagcaggcatagggtctcgtgtcatctgcccatcatgtacagatgttctctcttccttcttttgggggtgctatcacccttctccatcccttcctacctcccccatttccaaacctcagagcacctctcctctctttaagagttcagctctttccaaagtaaagctccttcagtctgtgtaagagaagcaagggttaccccaggtattcagctctccaaatcctgctgacccactgaaataacaaaaagaaaagtatttctgctgcttctttcttctccggcaaggacagcaaaacacaaggcaaaggcccataaacccggctgccatgtttctctttgcagaaagagtctcgaaaagtattaaactcaagctgaaaatggaagcactctaaattatttaatcacaactacatgttagggctggtcagcgaagcagcactttgcaaaatattctttgattcatagccacttacgcctagtgttccatttttggaatgccacttaactgaacaatggggcataataaaaattttatctcttcaaattcttgttccttgaatttttctaggtaatatatatgaatttcatgcaaaaattcaaaaatttgcaacctcacgcataaacggattaaacctttgcaagtagctgactgaattctcagtggtagaatcggctgctcttcggggaacagaccattgtggagttttgactggcaaagctttttatctgtcaattccaaggataaccactggtgaaacaggaaatctatttctttttatgttttcatttccaggtaacttaagtttcaattttattttattcatcaagttttaccatgacctatttcttttctttcttttttttttaacttcaagttctgggacacatgtgcagaacttgcaggtttgttacataggtatactgtgccatggtgatttgctgaacctattaacccatgatctaggttttaagccccacatgcattaggtatctgtcctaatgctttccctccccttgcccctcagaccctgacaggccctggtgtgtgatgttcccctccctgtgtccatgtgttctcattattaaactcccacttatgagtgagaacatgcggtgtttgtttttctgttcctgtgttagtttgctgagaatgatggcttccagcttcatccatgtctctgcaaaggatatgaactcattcttttttacagctgcatagtattccatggtgtatatgtgccacattttctttatccagtctatcattgattagcatttgggttggttctaagtctttgctattgtaaatagtgctgcaataaacatatatgtgcatgtgtctttatagtagaatgatttataatcctttgggtatataccaagtaatgggattgctgggtcaaatgggatttttggttctagatccttgaggaattgccacactgtcttccacaatggttgaactaatttacactcccaccaacagcgtaaaagcattcctgtttcaccacagcctcgccagcacctgttgtttcctgactttttaataatcgccatgctaactggcatgagatggcatctcattgtggttttgatttgcatttctctgatgaccagtgatgacgagatttttttcatatgtttgttggctgcataaatgtcttcttttgagaagtgtctgttcatatcttttgcccactttctgatgggcttgtttgtttttttcttgtaaatttgtttaagttccttgtagattctggatattggacctttgtcagatgggtagattgcaaaaattttctcccattctgtaggttgtctgttcactctgatgatagtttcttttgctgtgcagaagctctttagtttgattagatcccatttgtcaattttgttgcaattgcttttggtgttttagtcatcacgacctatttctgttagtatttcaaattcttcgaatacagcttttcttccttcaattcttatttgttcccagtccaggcccccaagcacaaaaggttttgggaggggtaaagagatcttgtgccaggtactagttctggttgtggggatacagtgaaaacatggcacatacacaccatggaatactatgcagccataaaaaaagaatgagatcatatcctttgcagggacatggatggagctgtaggccattatccttagcaaactaacataggaagaaaccaaattctgcatgttctcatttataaatgggagctaaacgatgagaacacatggacacatagaggggaacaacacacaatggggcttatcacaggatagagggtgagaggagggggaagatatggaaaaataactaatgggtaataggcttaatacctcagtgacaaaataatttgtacaacaaacctccatgacgctagtttacctatgcaacaaacctgcacgtgtacccctgaacttaaatacaacttttttaaaaagccccaaaaggtttatgcttattcagccagaccctgttctaagtgctttacatatattaactcgtttaatcctcataacagccctacaaggtaggcaatattattgtccccatttcatagatgagtgttctcaactgaggcacagagaggttaagaaacttgcctaagcttgcacagctagtgggtggccaggcaagattcaagcccaggcagaatggcttcagtctgtgcccttcacacaggtctgtgaatcctgatggtggctaagtgttaagaaaaaaataaacaggatggtgatatattaagtacctgggggaaaacattccccatgtgctggtcaccgaaggttatctaagaggcagcatttgagtaagaacctgaaagacgaccaggagccagctacccaaagagtggggtagggagcagggcctggccttccagggagaggaagcaggaaatgtgaataatatgtgatgaagacaaagaggatgtggcaggagcagtgagaagccacccgcagtctttaagcagagcagtgatgtgagctgagctctttctccagcctgggctactgggtgatccgcggatgcgtgaccacctggaacatacggagccctggaagagggttctgtagctggagggtagggggtgacacgatttctggtggggctgggtggcaaaagataagactggatgaccagggggtccttatagccatcagaaggaatatggactttttgtccccaaagccagggaagccctgaacaggtttttagcgaaagttacgggatcagatctgggatttaggagaatcgctccagctggagtggagaatgcatctgagagagataagatcagcacccattcacagggctgctggagacatcctggtgaaagatgatgtggcctgagtatgcctggcgcccagcagttgctcactcagcttcaggcactgttgggataaggggctgccctcatgacttttcatgaggtagttatgaggacaggctccgtgatcaggtgaggaatgagagaaaggagggagggaaatgagctctctatccctgtttctggctttggggaggaggagggagcatgctgtttactaggagagggagcctggaggcaggattggccagtgaggcaagttcagtttaggacatacagaatacgacagtggccaaggcggaaagcaggaggtgtagatgtggataaaattcaacaactcctctaaggatggaaacaaaatattggaagagaaatgtatgtctgagctgggtgcggtggctcacgcctgtaatcccaacactgtggccaaggtgggtggatcacctgaggtcaggagttcaagaccagcctggccaacatggcaaaaccccgcctctactaaaaaattagccgggcatggtggtgggtgcctgtaatcccagctactcgggaggctaaggcagaagaatcgcttgaacccaggaggggaggctgcagtgagccgagattgtgccactgcactatagcctgagtaacagagacagactctgtctcaaaaaaagaaaaaaaaatgttgtaggtctgaacatttcctcattgtccattactaggtgttgcagtcaaaacaaatcaggactagaactagtctgcgtgcaaagaaacaatatgccctctgaggacctcagaacacaaggagatgggctccaattgcattatcaaaaaatggggttttgcattggaatacgcctcacagactttagagaggtacctgagaatcccattcgaacctggcttcagatcatcaagtctccagtcagcttgaaataacacaggtagttaagaccagcctgggcaacatgacaagatcccgtctctacaaaaaatacaaaaattagcagcgtgtggtggggtgtgcctgtagtcccagttacttaggaggctgaggcaggaagatcacttgagcccaggacggggaggttacagtgagccgtgatcacaccatcacactccagcctgggtgacagagtgaaactctgtctctataacaaacaaacaaacaaacacaaaacaggtagtccttaacaccagcgttcaacttttttctccaatgctaactgtatgcccaattccctttctattgatggtgaggccttttgaactgttgaaaatttttaccagtgttgtttagaaaacaacacaggacctgtgactggaaaaaggtataattttcagtcagttggaagacaggatgtgagtgatttctttttattacgaagtttgtaagtcctcagagcctaccggtctccggaaaatgatgtttctagatctaccaagtactagatcaaccatggtgggaggaaaaccagtctctcccctgaagagtggatgggtgcaggttggaaattctagagaaagactttacccagaaacaagtcggcttttgctaagtggaggctcttgccagcatccccttttattttatcaccgtgttttgacaattcatgaaaaaaaatgtgtctaagagcaaattgagctcctcaagcaataaacatttagacataccctgtgaattgagttattgttcttggtggggaatcttcccagagtttgtttctcttttttggaaagacaacgtgtcagcccgttttcctaccccgggtctctcgcaatggaagtctccctctcccagtcattgtcgcgaagccttgacaatagccacatgcctcggttatcctgcagcaacttccattgaagagttgaggggagattaaaattcaatacaattggactagatcgaggggtaagagctgtgccttcagccaagggagctgctgtctccgggctctcagggtaggagagggcctcgagcggtggctttgggtgggttttgtgggggagccaggggtcccccgcttggggacctccgtgctgggcatcccgcacgctttggacgcgcgcagcctcaccgggagcgaactttgtctcgcctgcgggtgccacggagaggggctgggaagccgagccagctctggcggcgactgggggcgtccctggctttctgggggggcgggggcgcgcattgttgtccaggatcgggcggcgggcggtggcggcggcggtggcgcgcggtggccgcctagcacccgacctagcagcgcgccggggactggctcggggcgcgctgggcgcaccatgcggcgggccgggcgcgggcgaggggcgggccggcggcggggctcactggcgccgggccaggctcggcgcgagaggcgcgagcgggctatgggctgacgccgagggcccgcggcgggggcggcggcggggacggggcgggggctcgccagctgcgggcgccaaggccgcctagtaggccaagggccttcgcccgggcgaatgggacgcccgttccggggtaccagccgcttgcagccagaagttcctcggatcccttggaagcgcaaaaaataaaaggtaatgtgtctttgtttcccggtcgcggtggcagggaggcgactgacggcagcccttcgccgtccgtgttttcacgctgggccggggaaaagggacgcgccgctgcttctttactgggggcctggagtcgtttatttcgcgtatgttacagtttttaaatgcaaatcccacgtggggcacatactgtgctttctgctgcaaccctcccctcggcacacacacacctactttccttgggcacctcagtcccacgctgtctgaatctacccggggagataggaaaggacatggctttaggcagagctgtgtaggctttttttaaaaccattttctcagagtgccaggggagccctttcctttgggtgcaggacagggcgtttcagacaagggtggcgggggccagcagccgatcgccggtgcccggggctgctaagatggactgctttttacgttccaaatggctgcagcaagtttgatgcagagaaaacggacgctcggaaggggaggagaacagaagggaaccccctttagtacgtgctcatttaaaattggctaaatgcagtgcttctatattggaggcagctgctcaaatgttggtgcacgttgaattcagaaaagattcccggtgctgcaccgagaaagctgcgtgggctgcctgtgtgtaacgagcgacttggtgcctttttctccagtaccctgttagcagagtaactgttcgtacattcaggcgtattctgcgaaatttccaaaggatggctgtgctaataatagctctggcgacggcttcttaatagacatcctcattctgaacgatgcagccatgccagccccccgggaagtgcagcttgctgagaaacgagaaccaatgcccgcaaaggactccctgaccccaccatgaatggatgcggctctggctcccctatgaatggagcatcccagtggagacgctgctactgctgtttctggcttctttcagttcgaatcctcctcacagatggtgatgaaaggggttgctctgaaaacctagacaggcacatttctaagtctgagctggtcagtggtgacagcctgttctatcgggaatacatctgccttgacctgattgagggttcagctgctggtaccccccttccacctctgcatccgtaagtcgtccttttccaacagcatcactgatctgtgggaaagcaccgctcagagagcccgggacaaactgctgacttcatcctgggaagccactgctgaccctggggaagtaccttaggaactggatacagtaacctgtcccttagacttcatgaaacttagctgggtatgccgtccttcaaatgtgcagcaaagtgcttttgcattgggggcagcagtcggggagaggaagacacatttcattgttttgtttttggtctttaaattgtatcaagcccattcgtagcattaagccccatttatgtttgagtgtgacttggacttggacagggccagaagaccaaagcctcaaatcaacagaaatctggtttggttctcaaagtgttacttgtctcttgcaacctagaaggttaggagatgatccagtttgtacactgtcttctgttagatccattctgttgcaaaggaagtttgggtttatttagggcacagcaggaatgagggtcgtgtgacaaataggtttgaatccacttggtcctgagaagttaaatagctgcaattaatttaattggaggcaatatttggacatgctttgaaatcaacgctatattgtccagccggtgaatacaatgttgcctccagataagttagaaagaagtaatgactggtgtatgaagttgtgtgggtagaagtaatgttttagggagaaaaaattaaattcttattctttcattaaaggggaattgttttagtaggaataaggatcagaaaatctctccaccctcttttgttctgaccaagtgtgatctgccgctgctattgctatattgtttttggcacttgtcttgaactaattttattaataagacttgttatttatggcacgggttctctttgtaatttgcagacattgttatcaagtcccctgataacctggcaggtggctggtgccattagcatgatcttgtcattggggaaactgagaccccttgaggttcagtgagttgctgatttcataatccatgagaacagcatcccagatgtgcacagctctcgatgttattgtcacagcgaagttatagcctgaggtcaaagggaaagacatccagtgactccttgcttggttctggaacttggggagagagctctgtggaatagcagatatgcaagagttgccaaggaaagagctcttgagtcaaccttaaggagtggatgcaaaaagtgggattggtttgtgatgtgaaagaaagggatatggaaggttcaggagatctcatattgaggggacttgccaggctacctttgtctttaagtaagtgttgggtgagactaccatcaaagatcgttactgcctttactgcatgaatataccacttgtgtttacattgtttatgctggtgcgtgtgtgtttgcatccgcacgtgcgtgcagcatgcttgtagttcaattcacgtgtccagcaagccatatacttacccctcataagacttgcgtttagcctgacgcatcatactgaatgaaagtataatggagcaatttacaatctaaagctttgttcttagatatttttgcatattttaagaaaaggaacagtataacttttgaagaattcctagttcaatatgtcgaaatgagaaatagacatgctaacagttaaccagcttttgaagttcttttaaactactctccacagagtattagaatgtctgagtccagtgtcaggagtaacttcaattcatatgtcttatttttggggtagcacctgatatgataacatttgtggcagaatttctcttttttggtttatttgttgtgcaaaatctcagcatcttagaagcaatttctgggacctcataagaaagcaatagggtaatgatcttctaatgattcctcagtctaaaccctaaaaactatattccccttgagctaaaacaggagttctcttaccttaatagaatcagcaagtaactcaggcccatgtgccctcatgacctccccaggacactgcatttttatcggttcaccccaccttacccatttctgattctgcgctgtccgtttctctctggaaatgtcatgaaaggaacaacaacaaaaagatgttggatgtctctgaaaagttaggcattgatgtaagaaaaggaagaaaagggatcattgcatcaattgtggagggtatgtagatatttgggtttttcctccaatagcaaaatcagagtcagagaatcttggaaaagtggctgctaaaaaatctgatcttgtggggaagggcgtgctggattttatcttgaggtgttcattccagccataatcagactgaagtacatcagtagtattttccatttttagttgttgtttttcccagaacatttcatctccagagttggtacaatagctcttggaactttgggctttggagtcacgattgcacacaaaggccagacggtttcaatgctctcttctgcaaaaagttttctgaatcagcataaatccagcttatcaaaaattctcttcacagcagtttcattttagttccctaaatccatcagctgccaccctttccgttgtctcatggaatcagcacatccttctcttataaggaataatttagacacacccttacattggaagtaaccagctctaccaccagtggcattattttaaaaatccctatcactgttcctctcttacgtttacagaagatggtcagagctggtgctactgtttagtacattgcactaatgcttatttggggggctaatgagtgtgtgtgtgcgttcagttttgtttgttttttgtttttgttttgttttgttttcagatggagtcttgctctgtcaccaggctggagtgcagtggtgcaatctcggctcacggcaacctctgccaccctgcctcagcctcccaagtagctgggaatacaggcacgtgccactacgcccagctaatttttgtatttttagtagagacggggtttcaccatgttggccagtatggtctcgatctcctcaccatgtgatccgcccacctcagcctcccaaagtgctgggattacaggcgtgagccaccgcccccggcctcagttcttaactgtatcagtggaaattgggcattttcctcccaaagagaaacattgttcatcttccacttgaagatggaagtcactgctaagaataaaagtcacagttgttggaaagtaatagaggactatgggggatccggttcagttcaggggccttattactaccaaataatcaagaagaaatgagtggtagtctcagtttgagtcaaatcaaaacctctctacagatgtaccagcataattaattctaattcagagaagttccttgtaggctctagcttgttaggaagggcgatctctacactgtgtgatgttttctggctttttgttttaaaggtagagctccagccattcaatgatgcaatacaagaagaaacgtgttgtctgtggtcaggagcattggtacatccataccctttgccccaaactctgacttacattcacatgttcctttttgctcctgccttcttagcaattatttgccaatccgtggctactgcgtatgttttgcttgcatacactcactacattaactcgctgctcatgttgagcactcccaggaccctggttgtataagcaaatcgctgagtgagtgtatcagaccgcactccaacatggatctgtttagacttcagaaacctgaaaaaccagccaagcatggtggcgtgtgcctgtggtcccagctgctccaggaggctaaaatgggaggattgtttgagttcaggagttggaggttacagtgagctatgattgcaccattgcgctccagcctgggcaacagagggagaacctgtctctaaaaaaataaaaataaaggaaaaaaaagaaagaaatctggaaaaccccagtggtctaaagcacagtgtcgcttgttaggcccacctgtgtcaaaacttttcttagtctgtgctgtggtgtggcccctcttcctcagttagtaatgcattaccaaccttaaagtccggagtcctggtcctaatgcagaatcccaaaccttttaatgatattttgcacttcaaattagccaaaacctctccctgcacacttgaagctaccactccacaatttcctgtgggattagcctgttcattggtgatgcagccttctttgcagggtttttgcctttctttgtccttgctgtatggggaaggcatgggaaaaaaaaacaaaaacggcaggtaatggggaattagattgataatgcatcacagggaatggaaataataatcggcgagttgccaggctgtgccattcataaccagaaaatgcaccattacgctctcgccacatgcctgggaagaagtatatagatgtgataaaacccaaactaggaagccagacagtgtgggtcctccagagctagacgacatacctaccaatagccggagagtctagcgctggcttgcccatctcccgactcccactggccagccctgctaagtatctgatatttatttctctgttgcccagagagagagagagagagaaggagagatgggagggtgatgaggacatgaagtagacactgatggagcacaatggggagcagtgttcggccttctcaatccccttttattgggctgcttgagtgttttgtaacagaagaactgcagagtgaccagtagcacagatgtagcctgcaggtcttggcaggaggggagaaccatgtacagaaggcagttgtaacaagggctactgttagcaagggctgcagccacggctgcagggctgcccatcacagtcaatgcctggtgcagtctacaaaccacgtgcatatgtgatctcggggttatccagccaatcaaacattttagagagatggtgctttaggaatgaaagggggtatctagatcatttttgcaaatgaggaagagcttacaggcattgagggacctcgccctggtctcagctgctgcgccaaggctggtgtccctgcctcctgatgtggatctgtgtggtgcaacctggcatggcaaacagagaggggaggatggcgccatcttgccctgggtttggtcatttaaccagctctgccactgcttatgtggccttgggtgaattactgagtctctctgagccttggttgctttatttataagtgacattcggaggagcaaattagttaatatctgtgaaacgcctaactctcaaaaagtatgggagactcttttttctggagagatgggatcttgctatgtttcccaggctggtctcgaattcctggcctcaaacgatcctcctgccttggcctccccaagccctgggattacaggcatgagctactgcattaggcaaggagacttctctagaataagagattttgtctttgcatttccccctctccaaccttgtttacttatattactggaaggctcaacgatgctaactttggggggatatgatcccatcgaggtagaagaagccagctggctgtagaagtggaggtgctactgaaataaatggtgcatcctcacttataatactgaaatcaattttatagacagaaagtagtatacgtggacaaatgttagctctgatatttcacaagtgtcacctagccttccagaaagggttctgcagataaagtcatgaccctagccattcttaccttgttgggaacagggaagatttgtgaagatggcaggtggcaggatgtaatagagtcttctagctgtgaaaaggaattagggtctatcactgggagcagatgagagagcccagggctctactacatctgggtctccagcgagtcctggaacattaaggtagagaaggtcggtggggggaagggaaggaagaaaagacagatgactttgcctttgacccagtggattatattaccaatttctaagaatttctgaaattctttaattttcaaaaaagatcagaaaaagcttttatcttgaaaattctagaaaagatgtaagaattaccaagattatctcaatgaatggcaattgcatccttttctgaacaaaaaaggcaacactgtaatcaccccataatgttctttgtctacttcccatttattgccattaattaggaagattttcaactcctatttttatttattatattccacccaagtcattaatgcaacaagttaatggcagaaataagcctagatcctgaatatacaggatgccttttagggagtgtgtgtgtgtgtgtgtgtgtgtgtgtgtgtgagtgtgtgtgtgagtgtgtgtgtgtgtgtgtgagtgtgtgagtgtgtgtgtgagagtgtgtgagagtgtgtgtgagcgtgtgtgtgagtgtgtgtgtgtgtgtgtttcttttccattgcatcaaccactcaaccaccgtgaaaatattgggatagtttccttgtagttcgagaagtcaacgtgtcaatttgcataatgttcatcgaaaaaattttaagcacttaataaccttctaaatgttaaataaagtcagaacgagagatcatctgtcttctggagactgattaaacaggcacacacaggcagcagaagaaaaacattaggcaaatatgcaaacagggagagtatttatagaacattatatctgcatccaagactaggatatattttcagtgagccctaagggacagcgtatggccatcttttgcctagacagggcggagtgtgtctgtcatttgatggagaaattataagctggtatttgtttgtggttccttccttactttattgtggaaaatatggcttttgtcatccacaacaatttagttcatttgccttcctgttcctaaagttgtaaattagtcgatagagattttgtgccatgcagagatccgtcgacctgcaggggacttgattggtcttgggtgggttgaggaatctgtggattcttttttctttttctttatttagagaaagggtctcactctgtcactcaggctgaagtacagtggtacaattatagctcacagcaaccttgaactcttgggatcctgctaggaagctgggaatggcctagatcnnnnnnnnnnnnnnnnnnnnaaaaaattttaagcacttaataaccttctaaatgttaaataaagtcagaacgagagatcatctgtcttctggagactgattaaacaggcacacacaggcagcagaagaaaaacattaggcaaatatgcaaacagggagagtatttatagaacattatatctgcatccaagactaggatatattttcagtgagccctaagggacagcgtatggccatcttttgcctagacagggcggagtgtgtctgtcatttgatggagaaattataagctggtatttgtttgtggttccttccttactttattgtggaaaatatggcttttgtcatccacaacaatttagttcatttgccttcctgttcctaaagttgtaaattagtcgatagagattttgtgccatgcagagatctgcaacttccaactgggaaagatatccaaatactcagagaatacgagaatagtatgcaaaaacacagtgctttgtttcttggttttttttgtttgtttgttttttgagacaaagtctcaccctgtcacccaggctggagtgcagtggtgcaatgtcaactcaccacaacctccgcctcccaggttcaagaagttatcctgccttagcctcccgagtagctgggattacagccacgcaccactacacccagctaatttttttgtatttttagtagagacggggtttcagcatgttggccaggctggtcttgaactcctgacctcaggtaatccacccgcctcagcctcccaaagtgctaggattacagccgtgagccaacgcacctggcagagctttgtttcttaagcagctagatcctcctttgcttcttgccaatgaaactgaccacgctcctagagaactgacaaaactcaactaaaaaattccataaactggctgggtgcagtggcttatgcctgtaatcccagcactttgggagaccgaggcgagaggatcacttgaggacagaagttcgagaccagcctggccaacaaggcaaaaccccgtctctacaaaaaatacaaaaattagccaggtgtggtggcatgcaccagtagtcccggctacttgggagactgaggtgggaggattgcttgagcccagaaggcagaggttgcagtgagccgtgatagtgccactgcactccagcctgggtgacagagcgagtgtgtctcaaaaaaaaaaaaaaaaaccaaaaaattatactgtggcttttggttttgtattggatgtagataaaagtcaatacaccagtgttcatttgtaggaaagatggggtggaggaactcaagtatcgtggcttgccctgctggctgggcagtgaggatgaagagggcacatggcatctgccctgtgccttcccagcagaactttcctgaaggagcctgtccgtccatctggttttgaaatggctgattctgggtttggctacttaccagtgttccctaaatactattccccaaagcagcctcactgggtaggattccagagcttacaaatgctttgctgtttccctttgtgattactggtcccacctgtggttttctcattactcctcttcctcttcctcctccaaggctcagacctcattgtcccatgatgtgactcaccatgcctgcctcgagcttcctctttctgcgttgctcggagtcagctgttcttcagctaatctttccaatcaaatttctccaatgcctcggtccatacattgtcttcccacattcttttagggtgaggtgctgactgccattgtcatagtttaggggctctctttcctgagtcattataaaatcatcacagcttatcctttggccagcttcctatacccctgaccacatccacaacccccacctcagcaccctgcattcttcgtagaccacagtccttagcatggaagaaaaagcccgtcacaatctagaggcttcttatttcttaaatgtcttttcttatgttaaccatcacacacacacacacacacacacacccccttgcctctccccaagcacatttgacctcatctggacttcagcctttgcaattgctcccttcacattgccattcccctcccatccctttcctgcctgggacgcacctactcattctttacttggagcctccagtgttccctgctcctgttcctccaagcagaagcgagttcctctcctctattctccagaagcatgcgtgctggaaggcagtcgcagttcgatcctatggacagtgacgacctgttcacatgcctcccaccgtcgctttttaggggtaggaccgtatcttctttgtcgttgacagcacagcacccagcgttatccctggcatttggcaggtgctcagaaatgtaactgaggaactcattgtcacgttgtgatttctccttttttgacttgtctgcgcagatctctagggactgtttcctgctccagcccagggcccctacctatggtcagctcttctctctgctagggagctctgctttctctctctgcctgtttctatgtcaaatgggaagagaataaggatagtgtgacaactctctttctctctctgtctctctctggcccattcttgctctgtcactcagattggagtgcagtggtgcaatcatagctcactgtagccttgaactcctgggctcaagtgatcctcccacctcagcctccccagtacctggaactacaggcatgcaccaccatgcccagctaattttttttttttttttttttagagatgggggtctcactagattgccttggctggtcttgaactctgacctcaagcgatcctcccacttcagcctctcaaagctctgggattacaggtgtgaaccaccacacccagccctcctttttttcgtataaaaaatgctaccctggcaaaccccagctggcaaatggcagaagtatttgagtgccacaagttcattcattaattcattcatgcacccacccattcaatcattcaacacatacctattggtatgccttgaacattccaggaatgtggcagtgagaaaaaccaaccaagtcttgcccctggggagcttgcattcgaagaggaaggggcagacaatccacatgatccataagtaagtgacagaggatgctagaagctggtaattactacaaagaaaaacaaagcagaggaagggaagtgtgctaagttgctcttttaaacacaggggtcttgtagacctcgggaaaggtgatcattgagcaaagactgaaaggatgtgaggaggtaagccaggtgggtgtctggacgtggtgagtattccaagcagagggcagaattcatcaaaggcactgaggcagaagtgtggcagggaacaagagaggttgcacccaggagaggtcccagagccatgtggtgcagggtgaggactggtgggagtcacatgggcctttaaggctctaccctggggggctctccccattgtggagctggggagcccctggtcccacggaggccatgcagaaatggtttgggtgccgtgtgggtgagattgcaaggtgggcagagttggaagcacatttgcaagaatccagacaaatgatgacaatgatgatgatgacggtgatgaaaagtgttcaggttctggatattctgaagacagaaccaacaggattttctgagggttcagtgtgggatatgtgataaagagaagagtccagaatttggggccaaaagagcacaaaatggagatgacgaggcagagctaccattacctgggaggggaagctgtgatctggggaaaagtgagatcaggaattccgtctgggactcgccgagcttgggatgtttaacaagggaccaagtgaggtgtggagagggcagttttgagcataattctctacaaacctgggtcaggggacaccacagtggagacacagagttgaagctcacccatgtacaaacgatgcttaaagcacaaaagactgccaactccagggttcagaactgagtatgatgacatctgggaaaatgcataagcaccaaacttcaaataataagaatataatgtatgaaaaacagccaagcgtggtggctcacacctgtaatcccagcaacttgggaggctgaggtgggagaatcgcttgaggccaggagtttgagagcagcctgggtcaaatagtgagacccatctcaagaagaagaagaaggaggaggaggaggaggaggaagggaggaggaggaggaagaaggggaaggagggggagggggaggggggagaagggagaggaggagggagaagggagaagggaggaagaggaggagcaggaaaaggaagagaaagaagaaggaggaggaagaggaaggaaagaaaagaattcctcattgtgtgaaaagttctgttgagatgtgccattgtacaaattgaatcctcaatgtcatgctcctgatggtgtctttttgataacttggaagaaatgtctctcttttattttattttatttatttgtggggagatggggtatcaccctgctgcccaggatggagtacaatggtgccatcatggctcactgcagactcaaactcctgggctcaagtgattctcccacctcagcctcctgagtaccagggactacaggcccatgtctccatgcctggctacgttttttaaaagattttttttgtttgtttttgagagatggggtcttgctgtgttgcctaggctggttttgaactccaggccaaagcactgggattaccaccacacccggctaatttttgtatttttttttagagatggggtctcactgtgttgcccaggctggtctcaaactcttggcttcaagcaatcctccagccttggcctcacaaagtgctaaatctcatatttaaatagatttattaatatatcattgacatacaataaactatgcttatttaaaatatactgttggatatgtcttgatatgtgactatacctgggaaaccatcaccacaatcaggaattgtaactctgtacttttatacttttagtcaatcatttgtgtgatgctcaggactagacatgaggaaggatataaaatgtcatcactgtccctgcctcatctgtctgtcctgatttaaaattctggctttccaatactattatctagtcacagactcatttccaggttccttccttccttccttccttccttccttccttccttccctccctccctctctctttctctccttctctctctctctctctctctctctttcttttctttctatgttttgtgatggagtctcgctgtgtcgcccaggctggagtgcagtagcgtgatctcggctcactgcaacctccgcctcccgggttcaagtgattcttctgcctcagcctcccgagtagctgggattacaggtgctcaccagcatgcctggctaatttttgtatttttagtagagacaacgttttgccatgttagccaggctggtttcaaactcctaacctcaggtgatctgcccgcctcggcctcccaaagtgctgggattacaggtgtgagccaccatgcctggctttatttccaggtcttttctgaaggttttgctaaaaatacactgcactttggttatcaaagggtttggtgtgacatggtgagctgcttgcagcagtgtcactggttaaaccaggaaagtgcaaagatcaggagcccagccagcttttaagcagctcagatccaggcaaaaacatctctctccttccttctttcatggaaacagcccaaacactaggctctatttcagctttttttttttttttttttttgctacaagtagtcaacacagtaattacctcctgctgaaagctttgagaaattgttctgtgtccaattagaatttttgatttgactaacagatacaacataacatctttatttctgtaactgctcactaatgatatgcaccctggatatatttagactctcgtttgccggggccattgcactgtaaggtgctacgttactgtctgtgacagcatttccaccaagaggcttgatgaggatgggggtggggagacttttgggtttgggagtcctctccctcgctctttccacccctctcaggcctgaccttccatgcccaggcttacatggggagcagctctaggacttatcccctcctgggagctcctgacactggaccaggcgcccaggggcagatctccatgaagtgtctgggatggttcatggggcagccagccagtgtcaaaacctcccccaggaagaatggaaggagggatctgccagcacagctcatgcaagaccaagaagtccctgccagcgacattccagcagaaccctttccaaagtacttggttatgtaaacagaaaggcggtagcctctagcccagatggactgctccgtgtggatgtcaaagtcactgtggaaacttccccctatggaagcactacgggtccccaagctctccctgcagctctgtattggaatggggagggttggggacttctttttgacctcatggaactgggacctccgtgtaggactggtggttctctagttctcgagcgtccctgtttctcagatgtgtcttgctccgatgccactagaggtttgatctgatttaagggtgtcactggagtcagctgtcggtgtggagtgcttcctgctaaacgtggcaggacttggcatctgagcatgtggaccttggatttaggcacttagtacaggagtgctttgtatccaacacaggtttagcaaagcaggtggcctggcaggacatactaacctcataggtggccattttcctactgtatgtcaagagccaccaaagacccaagggtggaatttggaaaacttgcaggtggtctagaatactattttctgctccacacctccctgggaggcaatggagattatgactatagtagtatacaaagaagattgtttatgacaaggagagcccattccccaactcttatctatgtggcttcacccaccactgagggcagatccacattgattctgcttgtcacataggtatgtgaatgacaaataatgcatgtgttcctgagactggcttttggggcatatttctacagaataggcaaattaaaacatatttcactgaatgcaaattaatttatatagtacctatattacataattgcccttgaaattatatatataaagatatatgctatttaaatatatatttattattcatataaaatatttattgtgtgcctattatggcagtcacatcattctattttaatcacacgtattattgttttagtatcaataaaatgtttacaactgtgaaaacttattgtataataagacccatagttgtaaataatactgtgtctccttccattgatcacaacataagcaaaatttttttaaaatttcatttaaaacgacagattaaactggacactgaaacaaagtaggcaaattcatgttaccagaaagtgttattaaggttcttggttactgagcacgtgaattctctaccaaaccagcaacagatgccggtaactcttctgcacagaattacattttaaataggggatgttcgaccacacatttatatgagaaaaattggtagcatcaaaaagtagaaaaatgcgtttgtgcctatcagtctgtactaaaatttttgtaagctttctgaagcactgagtgaacgttgtaaaaatttgtttcaccaaaccacatgtaatattgtaccaaggaaacatcacaagtaaatacatcagctatcagaatgaatatattttcttggaactctttgtttctagctgtgcctatatatccatgccttatacatcacaacttattggagaggaagggaagggatcttagagtccgtctgtccctgagttctgtaatcctttctacaacttcccttgctaaagtctctggtcccttcctgatgatttgcagtgataacggggcaacccattccattttgagcaatgatgcttgttcaaaagttcttccttccattgaatccgaatgtatcttctggaatttcccctcattgggtctattttttgcccaccaaagcaaagttaacccaccttcactttatacacatcagattagcaagttcccccgaacccccatttgggtaagcccaggacagtcctagtttatacctgttctctctatataatcaataatagcctcccttttgcctcacaagtatctggtatggccagtaggttgtatggtcacgctaccactagagcttgtgatatgtaggccaccgatgcagcttttccctcagtcctgggaagtactggtttctggaccttcacccggtctagttatccttctttggtctctctcccatttctttcattttcttgtataaaatatggtacccacaattgaatacagatttccagaagcagtttaaccacagtagaatgcagggcacctcttaattcccttattccgatgctgggcttctagcacgtgcgtgaagagtacgacacaaaactgtaaacaatatgaccccaactttgacatttgaagctaccatccgaacctctttgccctctgtaaatctgatatgcatgcctgctatgtccctttacaaatcactggggggaaatacatggattgaggaagacaagttctactttaatatcactttgcagttttccaagtgcttgtggatcttgctgttgcagccctgtctccagactcccctcattttggcctcatgatgaaattgacttgaaaacagtgctcagtggctatttcctatttcaagcgatttagccatcctcactcagacgattagctcccccttctttgttttcataaagacggtgtccagctgtatttctcactgcttccttctcatccgccacggtgtccttcagctctttgcctgggtgacatttccagaacattctatgttctctcccatttcatcccttcttacctcatgttgctgtgttctgcagatatcactccttccctggggtattgacggatccaccaggtgtgagttagggtgtccccccgtccccatcccatagcatcttatactcacccctgtagtcacactgatcactctgcaacagcctgttaacttgggtatttcctctacagaacatagaagttccttaagtataggagcaaaatcacattcatcattatatacctaataagatccctggcacataataaagatgctataagcacttgagtgaacacattgtggtgaacattactgtgaataattctttattctatttctcttgtttcgatggggaaaattcctagaagagaaatgacagagtccaaggatctgaactttttagctgtttgcattctatttcctggaaggtgttagtggtcttctaattaagttgtaattatctactaactaaatgattttatctttaatatagtaattcccattatagttgttacaataccttcctgaaatttacattaactttttacttttgcttatggggccttgtggagtataatttattgtttagaatgatctttatggtagtcaaatccatagttttttcctttttggctcattcattgcttttaggcttagagaaacatggtaaataatcatctacctggttttaaaatttaactttataaactacctgggatttattttggggagagagtgcagttcatttatattcctttcatttccctcttgattgagaagagtgaaacaaacagaagctgaattgttcagcaattcctctttttttttttttttttgagacagtgtctcactctgtcacccaggctggagtgcagtggtgcaatctcggctcaccacaacctgcgcctggcaggttcaagcgattctcctgcctcagcctcccaagcagccgagactacagacgtgtgccaacaagcccagctaatttttgtatttttagtagagacgaggtttcaccatgttggccaggctggtctaaactcctgacctctggtgatccatctgcctcggcctcccaaagtgctgggattacaggcatgaaccaccacacccaaccagcatctacttgcttcaaacaatatttccattcccttccttgctcttcttgctttgaacatatctttaaaggttcttttattgtccttagactttccttgttttaaatatcagtgtcatgactaggtacggtggctcagcctgtaatctcagcactttgggaggccgaggtggacagatcaccagaggtcaggagttggagaccagcctggccaacatggtgaaactccatctctactaaaaatacaaaaattagtggggcatggtggccggtgcctgtaatctcagctgctcgggaggctgaggcacaagaatcacttgaacctgggagacagaggttgcagtgagctgagatcgtaccattgcactccagcctgggcgaaagagcgagactccgtctcaaaaataaattaactaatttaaataaataaatgtcagtgtcagctttccaactctctccctgtaaacttgtagtgcacgaaaaatgctggaaatattcctcatacacactttgttctactacaatctagtctcctttgcgagttctccagcacacatcctgtgttcttcatgtctcaatcttcacttcctcatttaattttatcatgtgatcaaaattttacgtttaaagtcaccatcccatatgaactatatttttttagatccagagagtcaaacttatcttttttttttttcagccttatctttttttctaggcttttaaaaactgtctgtctggggtctccatctaactattcttttatttttttattttattttattttttttgagacagtgtctctctcttttcacccatgctggagtgcagtggtgtgatctaggctcactgcaacttccacctcctgggttcaagtgattcttctgcctcagcctcccaagtagctaggactataggcgttcaccaccatgcccggctaatttttgtatttgtagtagagatgacgtttcaccgtgttggctgggctggtcttgaactcctggcctcagctgatctgcccccctccgcctcccaaagtgctgtgagtcactgtgcccaggctccatctaactatccttttctactctaaaaattccaagtacagtcatcaaaacaaaagaaaaggtagatacttgcctttccctttgaaaaaagcctctcattctactccaaacaaacaaacgaacagacaaaaatataaacaacctctgtcactcatactgaagccagagctccatgtggcaaagaacaggtgttattttccatctttcctcactgttcccccagggaacagttggatgttaggtgggtgtgtactttctggccacttcttgcatgttctgtttctttggggtttacacctctcccagctgcccttgcagaacgtctgcgtgaacgcatgtgctgtgaataagaattacgtgcatgcgtaagaacctggacattttcccacacatcgtacatgggtattcctaaacctcctttcttaggccagctcctgtattccttacatctgctctcaacgtaatgagtgcgggtgccacaggatggccctgggaaccagttactgggaaaaagagctgggcttctaagcgtcctgtctgaacgaagtaccctcctcaacaaatgaccagtgcccccagagcttcattttgtgaaggcctggcacttgctcagtccctgaagacagccatcccaatgccacctgcccagaattagcctcctcacccatccagagccacaggagacctggcatgaggggacagagacctgcagcgcccccgggccttcctataggagcagggagcagcaaatcagatcagggcctgactccactgtgtgtaggcggcagtcagtggttcagcattcagcgttctgcactttttatgtgcagcgttcctcatcacaactctacgaggtaggaattgctgtcatctctgttttatagattacggaaggaggccacgttggtgaagtaacttctggaggatcacactcagctaggaagtggtgaagccaggataagccacagccccgggtggccgagctctggagcctggctctgacccaccgtaagccccggcggtgtggctcagggagggtagcaagggaggcacagtgtgtggctcagacctctgggtccccaggtagctggaggacaggagtgggatgtgtgcctggagcctccttcccacgcttggcatccccagcagtccactgagtctgcgagatgcaagaggatctaacagctgtttagagccccctggctgtcccccgtgcccttctctgcaggccaggtctggagaaggcctggagtggcagagcagggagaacctggcagagtcagcggcttcctcagtcttttgtacaaagctaaacctggggaaggggaaggtgaggtggtctttatttttttaaggaagatgttcgtggttttattgtttcatgaggcattgaaacggattctgcacaaatcagtatctgtccagtggggtagctggtttctccttcacttctttgggttactagagcaacttgtcagattttttttaaaaaagaacaaccattccaaggcatgcactgtcacaacacaaactcttcctgtcagaggccgctggtccggtgtccagacatcatgcaggacaccttggtggcaacagtgcaccgtgtccgcccccacacagccccgtgcatttgtgtatagtatctggtgtgtctgcagaagcgtgaatagtattgggaagaggagggagaaagaaacagcgtgagtgcctggctgggaggaggtcagtgaagtcgtgcagggcaggcctgaacatgtctgtcatcagggcgaacccaagcatccattatgtcctttcataggaacatctggtggagccccataatggggtcttcattggcatttggctggctcacaagcatgctgaggatgcagttagctggtgtgggctgacggtcctgcaccatgatgctatgctggattttgtggaacagaaggctggatggcttcttcacaatggcagctttcccctcgagctgctctccttcccgcctaaggcgtgatatgtcaatgtaaattgtgctgagttgagttctattgttatagaactcaataactgaacgttgaatgaagatgggtccagtcatctcccacatgggcttgcctcccgttctggagtgtcctcagcctcactgagacccaggagctggcatgatggcagtggcggcaacccagcacggtcttgatgttaggtgtcctagcaggaggggaggggaggggaggacggagcgtgacagcccagggtagctgccagatagtgctgtggacctgcctctcaggaggagaaggtgtgtggcatctttctctcaagccagtaatcagcaagaaacaggaccacggctccttgggtcacctgtgtccccagcaccgggctgaatgcatggcgtagaggagaccacagcgatgggctttggactttgagtgaaaaatgtgcctccaagcaaaggtaacagcatgggccaggccccacggcaagggagaggatggtccttggaggaacagactctaaaagtcccaggtggcccactcttgaaactgagaggagcgatgggaaggagagtatttgaaaaaaagggatctggtgaggtgaggccgatgtcagagagcctgttatccatgttcagacagtcgtctttcacagatgctagcagcaatatgtaaagaaggaagaatctcactctgcacccacagcaggactggcctctggggccttcaggcctctgtccagatctgcccaagggctgctctctgccacccatctctgttcccattagcctctgcctctgttcagactgcacagcactccctctctgatccagattcccagctccctttcctttgtaaggattaggctctattcccttccccagcccctctcctaataataatgattaataataataatacaatccagtgctcagtaggattaaggctctgtagctcttcagagactccggttgctccagttgcagaaccaaagatatccgtgtttccaggcttggatgaaaagtaaaacctgcagttgtgttgtaaatgagggcttgtgaataaatcttcctaattgtgtgtatttccggtagaatagtgggttaaaatcctgataatgtactcgaaatggaggtaaagaaaatcccgttttcagaaaacactctaacagtggcagaacctaggaggaaacaggttcctccaaattttaggggtccagctagttggatgtcacccagaaagcgctgctgccccccaggagcctggagttctttgtacacctgcccgccacctgtgagcggcttctgccctgtgctccccagtatggtgtccatggtgcaggacctaattctggggcccatgccattgcgtctttcagcgtccatctgcccttgtcattgtagtcagagcgttggctgccaggcgtgaggagggtgattgtggacccgccccagcggaatcttggccttccacatctgtcgcacctgtccatcattcacgccagtagcttgtttggttggaaggtggaaagtgcacccacctccccacatcacacaactgagctgtgggtaggagttcctcttcagcgagatgccataacgccctcaggagagcttcctgttgtaccagcctcttacctgcctgggtccacgcctcatcgtctacactttaggcccagagactgattattaatgttttctgacacgctgccctgtagcattcatgtggagatggttcattgctcggcctggaggacttgtggcttgaatcacatagaccgctgggtccccacacccggacttctcttttgcatgatcagagaaaaccgaatttccttttgctgcatgagcagcagcagcagcgtccctaggatgagctttccaaagatccgcaagtaaaacgccagcccgggttatgacttgaagtgcaaacccgcagagggttgagctttgaagaatgcattgctatttccattttctattacatcaatattgtcatgttaatttgtttctaatagagccactcacttaataacttccatctggtgtataagctgcagctgtatccagccaccaagaacctgaaggacacacctgcatgtgttttgttttttgttttttgagacaggatctcactcggttgcccaggcgggagtgcagtggcctgatctcagttcactgcaacttctgcctcttgggctcaggcaatcctcccacctcagcctcccgagtagctgggactacaggcacacaccgccatgccctgctaattttcatattgttgtttttgggttttgccatgttgcccaggcaggtctcaaactcctgagctcaaatgatcctcctgcctctgcttcccaaagtgctggcattacagtagtgagccgccgtgcctggccacacctgcgtatgtttttttaaatccaggagagtcacaataaagacaggtggaatcgtttgccagaggtcatagagcaaaataggaacaaggtcatcctctctgaatgaggcttctggtgtctcgtgcctgtgtctcctttccttccatcgtcatcttacttcaatatggtatcacttgagaaccgaacaaaagtaagcttgagataaaccagagggaaaagttatcataaaaatcatattacaatgataataaaaatggttatataaaatttttataaaataaaaatttgtattaaaaattttattaaaaaattacaatcaacctttggcctttaaaggttttgggtagatcccacttgcccacttttgtaataagtgttatttccctggtataagtgaagtgtggacagggaattgatgaattttatttttgagatggggtctcactatgttgcccaggctggtctcgaactcctgggctcaagcaatccttctgccttagcctcctaggtagctgggattacaggggtgagccaccatgcccagataggtgaattaataaacatatatagtatttattatatatatattatttattatatattatattatatatattatttattgtatattatatattatttattatatattacattatatattatattatgtattatttattatatattatatattatattatgtattatttattatatattatattatatatttattatatatcatattatattatatattatatattatattatatgttatttattatatattatattatatgttatttattatatattatattatatatatttattatatattatattatatattatatatttattatgtattatatatcataattatatcatatacattataataatatataatatatattattttatatatattacatatatatctatatgggctgaaagtggtggctcacatctgtaatcccagaactttgggaggctgtggtgggaagatcacttgagcccaggagttcaagagcagcctggacaacatggcgagtccccatatctacaaaaaatacaaaaattaaccctgtgtggagatttgcgtctgtaatcccagctacttgggaggctgaggtgggagaatctcttgagccccaggaaggcagaggttgcagtgagctgtgatcatgccactgaactccagctgggaccacggagtgagaccctgtttcaaaaacataaaacaaaaaaacaaacaaaaaatatgattgtgtatatttgaagtttacatcataacgctattggatacccatagatgtgtagatacatacagaaccacagtagataaggaggatgaacaagtctagagatgtaatgtacaacatgaggactaaagttaaaattgtattgtgttagggttttttgttacataaatagattttagctgctctagtcccacaaaaaaagtaaccatgtgagatgatagacatattaactgactccactgtagtaaccattacactatctgtatgtatctaatttttttgattgtttgttttttgagacagagtttcactctgttgcccaggctggagtgcaatggctggatctcagctcactgcaacctccgcctcccaggttcaagtgattctcctgcctcatcctccccagtagttgggattacaggtgccaacatacctagctaatttttgtatttttagtagagaagaggtttcaccatgttggccaagctgatcttgacctcaagtgatctgcccacctcggcctcccaaagcgctgggattacagggcagggattaatgttttaacagattttaaattgcctgaagtcctttctttccatgtgtgtatttcccgtaaatttcttgaggttgctgtaactgcgtgacattcattcatctcctcctggctgtgatgtgctttatgatgattgagattttgtggtcttgcaatgtttgggtacctagattggactttgagtcttcacttttctgtgaaggaaactgaagtggagagaaggatgtgtctcttgaggtgacccagtacccgggagcaccaacaatgacttgtgccgggaagttgtagtcatggccttggaatttccttctgagccacacaacagcctgggtcagaggtcagatcatgaggggctgctgtcccgcatccgacatcctcagggtgtcctgtggtttaagggactgtgctcggggaagacgtgctgtcagcggtaagtcactggtagggccttggcttttgaaatctaaattttctgtctgatgactaagttttaaaggatagcatttcaggtggtttggggagtattggtaattttcctaactgaagcatatcttggaaggttgtttgttttgtgcaattctagtgagtcattaatattgctgattttaatgtcttgtaaatttattgtctcaaaaatgaatatcagaaacaacgtggtggcttgcttttcacggggatgtcaacgagtaggcaattggtaactagactaaaaaaatgttttggcaggcctgtgaacatctcactaaacagctctcctccctcaccgtaccttccctcagccccgccccacagtgtcttccctgaaatagtttcagtgtaaattagcctcaggaaactaagagaatacaggtgtcaattgactatttttttactttttgttttaaaaaacacatgtttttttctgggttcaggatcaatttgcacaactgcattacatttctataaaaatgctctaggccaggcacggtggctcatgcttgtaatcccagcactttgggaggctaaggtggggagggtcactggagtccaagaatttacatagtgagacgtgtctctacaaaaaataaacacagttagctgggcatggtggtgtgtgcctgtagtcccagatacccaggaggctgaggtgggaggatcgcttgagcctgggaggttgaagctgcagtgagctatgatagcaccaacgcactccagcctaggagacagagcaaaaccctgtctataaaaataaataaaataaaataaaataaaataaaataaaataaaataaaataaaataaaacaaataaaataaataaaataaagtaagcctgatagtatctacctcctgtcctacaaggactatgggttcaacacatattatttccaaaaccatacaactgataataattaacagctaacgttatgatgagtatatacttcgtaccaggtacagcactaagaaatttccaaacattacttaatttaatcattgcaggattcctaagaggtagacgctattttatccctcttgtacagacaaggaacaaggcttaaaaagatgaggtaagctggtcatgttggatcactcctgtaattccagtgcttgtctgggaggccaaggcaggaggatcaattgagcccaggaggttgaggctgcagtgagccaagatcacaccattgcacaccagcctggacaacagagcaagaccctttctcaaaaaaataaataaaaacccaaatgaaacaaaaacattctaaacagtggaactaggattctttcttctcagctcctcctgcacaggcatataccatggcatagaaattattttgcaggccaggtgcggtggctcacacctgtaattgcatcattttgggaggccaaggcgggtggatcacctgaggtcaggagttcgagaccagcctggccaacatggtgaaaccccatctctaccaaaaatgcaaaaaattagcctggcatggtggcgggtgcctataatcccagctactcgggaggctgaggcaggagaatcgcatgaactcaggaggcagaagttgcagtgagccatgatcgtgccacttcactccagcctgagtgacagagggagacactggctcaaaaaaaaaaaaaaaagaaagaaagaaggaagaagaaattattttgcaaagggcaagaaagaaaagggagacagaggacatcaacaagtggctaaaccaaaaagacacagaggaaagaaaggtggtatgttgagaaaagggtgataggaagcaatacatgcaaatagggttgacttttttttgaattcaaagagcaactattctcagtaagacatatttggttttcttttctttttttcttttttttttttttttgactcaagatgtttgcactgtctttaagaaatggctttgctatggcggggtgtggtggctcatgcctataatcctagcactttgggaggccaaggcgggaagatcacgtgaggccaggagttcgagaccagcctggccaacatggtgaaaccccgtctctactaaaaatacaaaaattacaggagcgtgttggcaggcacctgtaatcccagctactcgggaggctgaggcaggagaatcgcttgaacccgggaggtggaggttgcagtgagccgagatcatgccactgcactccagcctgggcaacaaaatgagactccatctcacaaagagagagagagagaaagaaagagagagagagaaaagactttgccaaacgttaaattctattactttccgtgtccctgtgtggtgtgggcagcagaatgttctgaagttgctgtcttatgactgtttccaatctaagcctaaaccagaaaaattaaattccaactctgatctgggtactctgcacctctccaaatagggtcactcatctttctagataaagtttcttttttacactttttttaactgaaaaaaaaagtaacatattaagtcatatttgggtgaggtggagtggtgtaaaccacccagaagcctaaagcgttgcacatctactcctatatatatatttttttgcctcttaatccctgtccacgtgcatgacaattaggatacgtatcatttgttttttatttttattttttgagacagggtcacactctgtcacccagggtagaatacagtggcgcaatcttggctcactgcaaccaccacctcctgggttcaagcaattctagtgcctcagcctcccaagtagctgggactacaggcgtgcaccaccatgcccggctaatttttttttttttgtatttttagtagagacagggttttgccatgttgcccaggttggtccctaactcctgagctgaggcaatccacctgcctcggcctcccaaagggctaggattacaggcgtgagccaccacgccaggccaggatacatatcagtgatagtctgctgtggtcactgaagctagtatcataaatgtgtttacatgtttctgcacagtcttcatgtcagagtgtaccttagcagcaaagttggataaattggggcagacacttcactttcaaaagaacactttttcgtatttcctttagaatcacagggcacttggcaggcctctgcttgggctagaattgtatggtagcaaggcagttgattattggaatggttgccagttgacatctatgagaagccttgttctctaaaggatttcctttgagggtgatgccagggctcccgtagtgtctgaacagctggaaatgaaaaaaaaaagaaacaaaaaaaaaaacaaaacagaacaaaacaagggaaagcagtattatttcacaattgttagtattgaaaagaaaacttcagagtgcctggcaagccagacaaagctacagatgtcaattctttctatgtacacacccagaatggtgaagttttctgaactgatgataagaacaggatactctaatcttacttgaatatggaacaacaggcaggtgctcccttttgaaaaataaaccacagcagtgctgtcaaaagaaagctgtaccttcaaaaacatgatgattcaaaggtgagtctgtttagacacttctctgtgctgtttgcagagacattttgctttctacagggaggcattaaaatacggagcatgtttgtaaatttcctaggaattactgttgagaagaggaaagaaattggaagacctagggtggatactaacatcatgataaatagttacttccttaaattgctgagcagataaggtgagattgttttatgtaatgaggattatttttttcagatgaaaatgagaacctcagggaagacctttaagtgtgagtgtgaactttgtgagcttggaaatatttcgagaaaatgatacatttcatcttctttattactgcgattaaaactttatttgatccaataatgtctttcagataccaatttgttttcataaaatttattagactgtgattgagtaactcaagagcatgtttatacccttaaccttttatgataaaacgaagctcagaactgttttatagatgcagaaaacaaacagcatttctttcttaaaactctcccctattctctgtcgagacttttctcaaatctatgattaaacttttgaaagaatttaacataactttctgaatgtgataccattttccttcttaaaacttttactctattgaccttaggttctttccaatgagaactgaatcagcgtagctcgaaatttttatctaaagtacctgtgcaattgctattatctgccctattgaaacttgaaattaacatttctagtgtacttttttgatgaaggaatcatttatacattttggtaaagcagcagctattttagtctaatttaaaattgtaatggctttcattgaacttagggaatgattgaaaggaagctgatggatttttaaaaattaagtcaatcagtgaagatgcttactctgtgcaaggttgatggattctaataggacttgagcccattttcccactaagacaattaacacctgaagttaggggttcaacgggtgaataaggactttgcatagactcatcaaatgtccacagctgcctgctttgacttgtatgtgcggaatggcaaggctttggattgaagtttttcctctgtgtttaatctgttcgttggagtgtttaggagtatgtgaaacttttcttgatttttctcagagctgggggctgctaagtcattgttataactcagaatcaagagacattgagattagcccccatgtaagcaggacatgctatgttgttttagatcccaaaacaaggaaaacccgacttgatggaaatatgggatgacttcttttgaggaaggaataagataattttctcataggatttcatgacagctttggatatgttggtgataagtgaataatccctgttgaaccagaagagaagagactatcttttcttgttatttgtttaatcttgccgtacctgcaaatacattgggggttagggcttcaccatatgagttttaggggaacacaatccagtccataactcctggtctccaggagctcagggtcgaggagagggtcacgaaggacgcagggtggctggccactgggtgggactgagccgtgagtgcagtaggcaccttcggcccgcgactgtgctgccacctgcttccatttgcagagacgctcattctcatcaggatagcagttccaaacctaacaggccttgagaaatgtcagcgttattcttagcctggagagttggtacgtcccgtggcgcatgagagaaacgagactgctctgtagtcccagctactcaggaggctgaggtgggagtatcgctagagcctgggaagtggaggttgcagtgagttaagatcataccactgcaccccagcctggacaacagagcaagactctgtctaaaaaaaaattaaattaaaacaagagctcccttagggccaggcactgtgctaagtgtgtaaaggcaagattgtgtctcatctgagactgtcttttttatctttccttgaggaaagatttatgagaaggaccctcatggctggacaaggagacagggccaggatctactgatgcgcatcctttctttagatctgcttaaagcggccggttagccactaaatacaggggaaaagaactgtatttaatggggactatacagtcatataaaataggcattgagttctctaaaggatttcctctaaagaaatacaaggaaggaaacttatgtgtcatctggtccagagaggagcgttggagctatttcatactagcctgggagagccaattgctacattttcaggaatgtggggtgccaattataaagcatagccattgttaaaatgaaattatgtacacatgcttaaacacatggtgttaacaaacaaagataataaaaatctatcccttcctaattatttttatggcacttaactgttttctatgagcttgaggctatgtttgtctatcgtgtctgtatgttggaattactagcagtgttgtcatgacagtggcttgaaatcggacgcagtaaaggtatttagagtgcagcaagacagtttatggttaggacagtcaccagttgacatccatgagaaggcttgttcttcaaaggatttcctttgagggtgatgccaggctccagcaaatgctacaaatcaggctttttccttccagaaagccagttgttaaatattcaccagcaccccactgggctcggcccatttatttttggatatgagacaggggcatggagacgaacggtaacttgtccagagtcctgcagccccttgtaagcagcaggaccaacactagacttgggtctcccaggcttcctgttataccactcagagatttcagtcctgaaaggcacaagggacggggttggatttgcctgtgggttcatatcgccagtgcttttctattattggtgacagcgctgtagggaatcaggtcatacacaaggagggggccgattaactaacacagaaatcaaattcattgccaggtgggtggtcatctgctttctggttaccagcaagtgggataaatgaagaggagacagagattggatcctgagctgtgtccctaatgcatgcgggtacaattattgaatggaagaataagtgaagaatgaacaacacccaccacccctgagaatatgttatatatatatttgctaatttattttacatctcccttattagaatataagctccatgaggatgggaactttgtcttgtgtgctgtggtacacccagctcccagaaaagtgcctggcatatagaaagtgctcaattgatattttcttttttttgaaagggagttttgctcttgttgcccaggctggagtgcagtggcgcgatctcggctcactgcaacctccacctcctgggttcaagcgattctcctgcctcagcctcccaagtagctgggattacaggtatgcaccaccacgcccggctaattttgtatttttagtagagacggggtttctccatgttagtcaggctccaggttggtctcaaactcctgacctcaggtgatccgcccaccttggcctcctaaagtactgggattacaggcgtgagccaccgcgcccggcctcaatagatatttttgaatgaatgaatgaactgatccttccaactcctggcattatacagtgccgactcccagaggaagttttgcccagaggaatatgcctggcagagtgcagcgtcggcgaccctctaaccctttgtctggctgctagactctcagtgactaccatttctcttccctcttagatgacggagggccgccgatgtcaagtacatcttcttgatgacaggaagctggaactcctagtacaggtaaatcgcttttggtcaactttctgagtttctttggtgactgatgtggtttcagaccttgatccagctggggatgaagggggatttggtaaactgtttttaaatctctgttaatatctgtgagagaatgactaggacccaccagggtgttttgtgtgtgtgctattttggttgtatctgtacaccagcctaaggcatccaaggccagatgtacatctaccctattgttacaaatttctagaaaaggaaattccacaatgcccttagctattctttctgcctggaaggagttaactacaatgtaacctaagtaactcttgctgtaactaaaattgatttagtcttccttgctcagaggggatagaaaaaggtttggttctttttgtttgtttttttgttttgttttgttctgagacagagtctcgctcttgttgcccagactgaagtgcagtggcacgatctcagctcactgcaacctctgcctcccaggttcaagcgattctcctgcctcagcctcccaagtagctgggattacaggcatgtgccaccattcctggctaattttttatatttttagttgagacggggtttctccatgctggtcagactggtctggaactcctgacctcaggtgatctgcctgcctcggcctcccaaagtgctgggattatagacatgagccactgtgcctggcctaaaggtttgttcttttcttttccagttgagattaaagaggaacaatctctgtactcggtcctctttctaagtgctaagcgacccccttcttaccccatctcatgagttgacattggcatcacttgtgagcatctggagaaactgagatgcaggaaatcaatcaattccaactaagaacacatcagtgtcagcaaaattggagaagtaattggaatcatagaccctcacctttttcaacttgttcttaaacagaccattgtttgacccaaagctctaaagaatggtgtctccaactctgactttaaaagtttaccattccagatctgttgttcaatgccaatttttattacatttgcttgctgtttattcttagatgtctatctccaagtcctagagcattgtgtctcattctctatcacattttgttgtgaggaagctgcagttcatcagtgagttgagaggatgccatctgctcatgggggaagtgatgctacttcgaaggggaaactcgcatgcagacactttcgtcttgcgttgccttgtacatgctgcttggaattgaaaatgttcaaactgctgactttgagtgaatacttttaataggattcaaatgataaaggctttataaatgcaatataggaaacagaaaataggaaaaaggctcataagcacatgacactaattcaagtgttgttccctttttggtggatttctttccagcatttttcatatttatatttcttgcatggctgtaatcatagtacatgtataattctacatatcttatttttccttttccacttaccattgtctttcgctaacattttctaagttatggtaatactgtaaattgtcattctcctgaacagctgcataaattctagaaattgatataccattattatctaatcatttccccatttgagtatatttaagggatttaaaaaaaaaaattttaccactattacaagtaaatgctgtgattaacatatccctatatatagggttctcctgcattttagattacggctgttttaggctagactctatggcctaaagtcattaaaagtcaaatttgtggtttgaatttggaagaatgaggcaataaagggaaaccatcaaattgagtgagatctcgttaattagcagaatcgttaactgagaaacatttgaagcttcaaattgccaagactcagtgcgaagagtttataggcgagtggtctggtgtattttacatgcttttcctgaatcaaagcttggaggtttagaaagaagccaccttctggaataggaaatgagacctcaaatggcagtttagaaactatctcttggccagcctgctttcagaaaaaaatagatttaattactgatgtgtgcagtttgggaacagttgtcctcaaccctataaaatcaagaaaatgttgaattaggcgaacgagagaagttcatgttctttccactgctttatagaacaggcttcctgtgttattctctcttcctagaacacgctccttcccacacccccgcgccctggacctggctggtctctcttaggtctttacatcacaaattggaagacaccctccaccaaggctttccctgaccccctccgcctagtctgtactgcgtttctttcttatgacatggccacacctcgctgtgattggttgtgtacttgttatcacttcctggagcccccaacagtttgagggctagatctgtgtctccatcatggtgtatccccagtacctagcccagggtcaggcacataatgtcactaaataaagacttgttgaatgaaagaatggacaaacctaagatgtcttgacatgacttcccccaaagacttcttgccagagtaccagttgcttcacagaggatttagcttaacacacacacacacacacacacacacacacacacacacacttgcacaaaatccatctatagatacacacactatctacctatacatagatacacacacaatctatctacacactgagagatatacacactacctatacatagatagatacacgcactatttatctaggcattgatagtgcgtgtatctatgtatacatagatagatagatagatagatagatagatagatagatagatagatagtatttgtgtgtggtaagctaaatacatatatatatttatatttatatatatggaaaggttctaaattaattgcagaatgggctttagcaaaacttggagaaacaaaattaaaactactgaatgaaaggcagcttaaatctatcactcttttttttctcctctgcaaaattctgttgcccaggattctatctgttgggcagtatcctttctaaagggaatctggattctctagctcatctggacccacctctaggtttttaataaaacatttgacctaaactatttcatattttacattcagagagtggtagccttcaggttcatttatactttagtcatcaaaatatattaaacactgagactgatattgttaagaataatttcagaacatttgtaataagccttagacaaagcaatgcctttcctgatcttttgacctggagctgtagaaatggggatgggtggaaaagacacctacattgacctgacaaggtttgtaacatggagagtcaggtttagagcaagtgtttctctcccccagagaagtaaatgggtgtgcatgagggtggctgactgaaagatattaataagatggggcagattggggaggttagtttttacccactatgaggatagcatactcatcaaaggctatacctcagatcttcagacacagaggagcttctatggcatcagtgttgggcgagaaagctgacggcatccaaaccgactccccatttgcctcttgccaggaggatgcagtaagcagacaaccacacagataatttcatgcagcactgtaaactcggccactccgagcataacatttcccttctttgggttgcagagaaaaaatgcctgtcatcctaatgtttcatgcttattccatatagcactttgagattaccaagtgaaatctgtgcttccaaatcctctattgctctgagtagatcatacgttactcacagtaggggagggcaaacagtcaagagtgacatactaggaattaatatttgagacgctcatccctaaatccacaggcaatttcctgacacccacgtctttaccaggtagctccttaagtcctgaaattccacttaagagcagctggaaggtgacgtgagcattcagccccagagcatgcctgcagccttggttgtggacacatgcaggttgcatagacagattgccctgcagttcagcccacagacagcatcttctgctctgtcttccaaaattgtttccaccagttggaaatgtactttaaaaaaagcctttatcaggccggatgcagtggcttacacctgtaatcccagcactttgggaggccaaggagagtggatcacttgaggtcaggagttcgagaccagcctggccaacatggtgaaaccctgcctctactaaaaatacaaaaaaaaaaaaaaaaatagctcggtgtggttgtgcacgcctgtaatcccagctacttgggaagatgagacaggagaatcacttgaacctgggaggcggaggttgcagtgagccaagatcacaccactgcactccagcctgggcgacagagcaagactttgtcccccacctgaaaaaaagaaaaaaagccttcatcaaaatgagaggagccaccctcatcgcagtcttggaaccttctggaggacgctatagccagatatggggggcggagcatgttttatggtcagccgaactccctaagtctcgttgtcatatccttgctccttgaaaattattttcttcatttattctctgacccgaatgtatatttgggggagtatgttgagagcagagaaagggaagtgtgctttagccatagtgagaatgatttaagtaagaatttccggacagtgagagttgctagatggggtacaggaagccgttagtaggaaagattctggactctttctcttgaccttcataaaaatagagtggattttcactagaatggaatggctgaggtgtggcccttccttatttggttctcttgaggcttgtgagactgtagatatcctgtctcacagggagcctgcccagtgccagaaaaaccgacctgaccttctactgctagacaggcttcgtttcagtgcttctccccatcactttagatgaatggttggccgaatttcttccccatccccactttttgggttttttttttttttttttttttttgagagagtcttgctctatcgcccaggctagagtgcagtggtgcaatcttggctcactgcaacctccacttcctgggttcaaacgatctcctgtctcagcctcccgagtagctgggactacaggcctgcatcaccatgcccagctacttttgtatttttagtagagacagggttgcgccgtgttgacgaggctggtctggaattcctgacctcaggtgacccacccacaacagcctcccacaaagtgctgggattacaggtgtgaaccaccacacctggcccccacttttttttcaggcagggtctcgctctatcaaccagctgtggtgcagtggtgcgattacagctcactgcaacctcaaccttctgggctcaagtgatcctcccatctcagcctctccagtagctggggctaacagatgtgcattgctaattttttaaatttttagagagacagggtctccctctgctgcccaggctggtctccaactccagatcccaagtgattctcctgccttggtcctttccttctcaaagtgttaagatggcaggcgtgagccactgccaacacgcccggcccttcttccctttgatgataagagctttacacataggagtgctctccatcccctcaattctgccacagtgaacctcgcaccttgctttctccagggagctgccgcatgatgtgagtctcctttccaagttccaagctgccctaggatttccacatctctcccctctgacccagtcccttagtggccattggcaagacatttacaactgtccactgtgtgcaaatagaggaacaaagcgtccctatgattccaagaagtggagcaaactgtgactagtctgtgttttctaagggaattaaagataacagttagattattgccatgtcttacccagggctcataatcctgagattatgaggagacataatctcctcataaccaagacagaagcatttggaaagatctaagctgcacctcgtggtacagtagccaccagccacatgtggccattgagcaaaatgtggccagtgcaaatggagatgtatgcaagtataaatcacacgccagctgtgtgcaagcataaatcacacgccagctgtgagcaagtataaatcacacaccagcttgtgaagacttcctatgaaacttaagtaaaatgtcttgtaaataatttttgccttggtgagtccgtgttaaaatgataatattttggatatattaagataaaataaatatacaataaatttcacctttaaactttttaaatatggctaaaaaaattaaaatcttggtccaggtgtggtggctcacgcctgtaatcccagcactttgggaggctgaggtgggcagatcatgaggtcaggagatcaagaccatcctggccaacatgctgaaaccctgtctctaccaggcatggtggcgtgcgcctgtagtcccagctactcgggaggctgaggcaagggaatcacttgaacctgggaggtggaagttgcagtgagtcgaggtcacgccactgcactccagcccagcaacagagcaagactccatctcaaaaaaaaaaaaattaaaatcttatattgggctaacttttgtggctcacgttgtatttcttttggatggctatttctagagcagtaggcccaaaccttttggcaccagggactggtttcatgaaagacaatttttccacagatggggtgtgggaggtatggtttcaggatgattcaagcatattacatttattgtgcactttatttccatgattactacattgtaacatataatgaaataattctacagctcaccataatgtcaaatcagtgggagccctgagcttgttttcctgcaactagatggtcccacatgtgagtgatgggcatcaggcattagaatcttttttttttttttaatttttgagacagagtcttgctttgtcaccaggctggagtgaagtggtgcaatctcagctcactgtaaccttcgcctcctgagttcaagcgattctcctgcctcagcctcctgagtggctgggattacaggcaggcgccaccacacccaactaatttttgtatttttagtagagacagggtttcaccatgttggccaggacagtctcaatctcctgacctcatgatccacccgcctcggcctcccaaaatgctgggattacaggtgtgagccaccacgcctggcctagattcttataaggagtgtgcaaactagatccctcacgtgtatagttcaccgtagggtttggactcctgcgagaatctaatgctgctgctgatctgacaggaggtggggctcaggcagtaatgcaagcaatggggagaggctataagtataggtgaagcttctctcgctgctcatctcctgctgtgcagccccattcctaacaggccatagactggtaccagtccatggcccaggggttggggattcctgctatagaagatagaaaacaatttaagctagagaaaatattatgaaggcaatcgaattgtttggggttacccagatataatactggatgtttggcacaataatgactacattttacaattctttttctttttctttttctttttttgttttgttttgagacgaagtctcactctgtcgcccaggctggagtgcagtgacgtgatctctgctcacggcaacctctgcctcccgggttcaagtgattttcccacctcagcctccagagttgctgggattacaggcacccgccatcatgcccggctaatttttgtgtgtttgtaaagacgggatttcactgtgttggccaggcttctctgaaactcctgatctcaggtgatccacccgccttggcctcccaaagtgctgggattacaggcatgagccactacacctggcctacaattctttatagaatttatatggagcatatcttatttaatcctcacagtaactgtgtaaagtaggtgccaagcaaacagaaattcagaaagattaaataacttgctcaaggtcacgtagctagtgaagtataggtagctcgagcataggtcctctgatagtatagcccattctcttttcactgcaccataaccagtatatataataaaaacccaagattcacaagatatgatctattaatagttcacctggaatatgctcctctgccagcccctgacaccagagccataaacgatggcaaccaaagacttcgaaccttatctcaggtctgcaatggaagatgggcttacccaggtcatttcattcctgtgaactcacttcctaacctatctgggaaagcctgaaacatgtgacacatcctcatgaaggacttgtgcgtcctgcgtaagtctcgggctagcaggtgtggaagacacttccacagcagtggatgaaataatggtcgccttcctgtcactttcctctgtctgacagcgatgctggtgatatcccatcttaaaggtcgagtacattaatatgggctgtcagtaaaatagcactgagggcaagtaaatagtctgggctattatgggctagaaaaaaaaatgtatgactttttaaaaatctagaactgtaataatcttacctaaaataggtgaataaacttggttctctttttttttgagatggagcctcactctgtcacccaggctggggtgcagtggtgtaatctcggcttactggcttattgcaacctccacctcctgggttcaagcaattctcctgcctcagcctcctgggttcaagtgcttctcctgcctcagcctcccaagtagctgggattacaggcacctgccaccacccacagcttatttttttatttttagtagaggcgggatttcaccatgttggccaggctggtctcgaactcctgatctcaggtgatccacccacctcggcctcccaaatgctgggattacaggtatgagccactgcgcccggcctaaacttggattctctatgcacaggtgcacacccatgtttatattcaccctcatagcccagccttagcaacttctgtggttaatgatattctgcaaaaatgcaagagatggccaggtgctgtggctcacacctgtaatcccaacactttgggaggccgaggcgggtgggtcacctgaggtcgggactttgagaccagcctgaccaacatggtgaaagcccgtctctactaaaaatacaaaattagccgggcatggtggtgcatgcctgtatcccagctactcgggaggctgaggcaggagaatcccttgaacgtgggagatggaggttgcagtgagccaagatcgcaccattgcactctagcctgggcaacaagagcgaactccgtatcaaaaaaaaaaaaaaaatgcaggagattgttttctaccaagtaaagcaggaatcccccccaaagtgcatgttgccaagcagagaatatggagttgattccgtgtcttcccaactgagtagtgtgggcaggtgggctcattgtggtctgcctgctgggccatctaccgaggcgtgctccaggtctgccatctgctcctgtctggtctgaatccaccaggagtttctgtcacagccaagggctgggaaggcgtgtgcagaagctgggagcagacagagggactcagtgttatgaaccttctgtccgggacctcccaggccaccaggccacctcctgaaacaagagccaaaggggttcaggcagccccactttgggctgacctcacacctcactgcgatcccatcatcatttattaggctcctctctgcaaagctgggcactccaccaaatgagcaaaacagatgtcttcccagcccccaggggtggctgataatatttaacatttgaaaagcacatggtgaagaaagacatggtaagatatagagcacagacagataacgcaatggtaaatctatttgtaataaaaaacgcattgagtgatggagaggaataagaaatagtccataaaacatactcttggggagcacaagcagctaagtcgtttcccccttggtaaggagggaggagacacgatccatcttccttcttcagccaaggcctttgtagaaaagtcggtaagctttctttctgccctggttagaacaaaggggaattccagtctccccaagaggctgtgagagagggctgagcatcaggatacagcagattgatgcgatcatctagggaaccccccgccgcgtttacacacacacacacacacacacacacacacgtacacacacacactcacacccaggtgctggttgaggagaggagaagagaccatccccatctccccagcctaatgggtccacgctgccagttgcctggcaacaccccttctttgcgcccctgcccccctcccccttcttcctggaccacctccatgtctgtgctccttgtccctttgatgccaattttaacctgttgtaaaatgtattcattgaaaccatttgaaattgccaatatttggcagactttgtcctgctaaggggacaatttcatgtggctcaaacgtaaagggagagagaaaaaaagggagagaagacttagccctccagaacattgcaggtggttgtttcttttactactgagttattttttccgtgatatcttcacaaaatcctttccatgtcctccctatggtgccccataggagactctgtgcagatgggagcctcaggataggacattaaactacatgctcctagtttctgtctttctgctaatgggggataagaagggattggggagattaaaacaaactcaactcacaatgcagttctgcaaaatgcaaacgactgtatttacaggggaaaggcacacacgtgtgcacacacctctatgtagagcataaggatggggtcacagggacccaaggggtaacaaatctgtggctgtcatcgtttttattaatccataactcacagtttgattttgggcacattgcttaattcaagttcttgcttgtttggtaaatatttattatttgtctaccgctgtgctatgcagatctaagcatccgtttatttgggttaggagttcctgtctagaggtggtcaatgattattttggttgcagaactttttacgagtccaggagtggctggttcttccgtttcctaaaatgggctgagtgttcttcctcagctctgctgtgcctggaatggcttcccttgtccacacatcccacccgctggaccctgtcctttcttgtaaggggatccaggaggacatgaggaggcagatttactcatctggcagcctctgctgcaacttgtcccatccagtggaaggaaggaagggaggaagggaggaagggagggagggaaggagggagggagcgagcgagcccctcccctgagagaggagtgcagcctggccaggtatccctggtggtggagggaggaagcgaacggtctggggaaatctcagctgctctgtatttttctctgagtcttctaccccagcgggccttccctatcgcccttgaatctctgtttgtggcttcctggcttgcccagcacagagctgagagttcagctgtcaaagccatgtggaagatttccatattttgccagagcccctgtcccacccctgcggccgcccactaggtctttgtgactgaacacctcggtggcagccccagcacctcatggcaaccgaagcccatcattcctactcctcctccaacccgggtcatcttgttcttgcacctgctttgaaagcaagcccacagttctccaaattggccaggctttagaagccaggaaatttttttctgtgcccatcaatgacatccttaagtcttgcctgttttttcactggtaagggaacaactttccttctcctctccaatacatgccccagtgtagacatttgccaccctggactcagcatcctctgtgtgcccattgtcaccagagcagctccttgccaccctgcctagttccatgttcctggccatccccgtttgtcctatatgacacaaccagagtatccatccttccaggctccttcatgacttacccctgctcaggagccatcaacagcccatactattggattgctctctttgactctcgagttcctccatgatatgactgtgagctgtttacgagagacagtgtatcagagaggtgaggagtacagttgtgcccaaaccacctactctctgggcaggccctatgccattacagtcaccacactctgcccagcggagctggggccttgaactttacaattgcagggagttgcatccatagtaatggacagaagccaccatgtgaccctactatagagtcttgtagaccaacgattctcaaacttctttttgctgcaaaattctttgtccaatatcagcacatggagaaggtctgaaccccatcaccttcacccccaagcccactgacagggaggctctgcggggatctcagcagactcctgtgggtttgcaaatctctgctttaggtagaaaccagatgatagaaaatgtaagcatcctttatgctaataagcaaacacattcctgaaaagttcaatgtattagttggtgcgaaagtaattgcattaaaagtaatggcaaaaaccacaattactttggcaccaacctaatagattgaacctgaattttatacaccatatttcaaatgctttgggaaattatatagcttagtgattaatcatcatattagctaattgaacgcttatttttgtaccagactctgttctaagcgtttaatatgtgctgagtcatcttttcagccccacaactctatgaggtaggtaactgttattattcccattttttcagatgaggaaattggggcacagagaagtaaagtaacttattcagagttgtacagcaaatgggagaactgattcaaaaccaggccacctgaatgcagaggaccagcaggttccagcacgctgagagcacaggctctggggccggttgggttggcttcaaaacctgactctgatgcttgacagcttcgtgaccttggccatttgcacaacctccttaaccttcagtttcttcatctgtaaacggagaacactggctgcctcctgtcttgctgctctaattttctctgtaaattgaaactagtacctgcctcatagacttgtgattagggttaaattcactagaacatctgaagcgcccccaagactgtctggcacaacatgggcatctcttaggctgggatcagaggcctcggccagactgcttagtagctatggtaacccaggcaagtcactggcctttgctacctcgtgtgtaaaatgggaatgttaactaccttggcttttgaggaaagcatttaagagactattaagtgctacataatgtatggtgctattatccctaataatctggtcttctatacgatttcatgcaaggcttcatggagtagtcgtagagttcagtatcagttcacttgaaaagtgatgggttgacagtccatcaaaaaatgtcttaactgcccaaccttccagatctccaacacatcatcccctgatcttttcatgaacactggtgattactgctcatccctccaacgccatatataactcatgtgtcaaggtcataggatgacaggcagaatatatatgcacatgtgttcatactgagttcagattaccatctaaataagtggactaggttttgtgctccaatgatgtcaaatcagtcatcattcttggggataaaatagaaaacatgatttcaatggttgcatcccagtatcatgtaaatgaccccatccttaaggctttatattaaaatgatactgaagcacaactatatccgaatggatcatattggttttgatctgtgggaaggtctgtactgaaggcacactgtatcccttatcaaccagacagtgactggtctttccagcccattactcatacacgaaattgccacaagttcatgtactaactgttgcttcccaataggggctgtatccttcctagagactgcagtgtgtgattttgtagcgcacggtgggacacatgtttagaggcattccagcatattctcgtcaactgtgcgagactcagaagagcatgcgactagcagggcctgctagaatcccagtgatctttgaccattccctggagaaacacattctccaggaaatgccaaagtgccacttcaaactgatcaagaatttctttcttttagggaagaggattttaaaatatcacatgcagtccttttagggtagcaatagatcagtaagtacagtgattcttaaattttaaattgtcgatagatcttaagatatgttactacaataaagtgggccggatgttggtattatcaaaattctttatcggcattcctttactttggcccttcttcttaaaatagtgtcaatcttttataaataacaaaaaatatcagtagaccatattgatacaaaggtgttttagaactgtaataatcctccaaaaggataatgacctcagtactccatttcatttaaccacagatgagtaacagagttagagaagtgtgggtaaatcaccgattttcactcacctttgggagattaacattaaacattggtttaacatataaaccaatgactatgtgatgtctaaagccttcaatgttaagtttggtgggtctgtcaaccgcacacacatattcacacacacacactcacatacatatactcatgtacacacatacacaaacatgcacacacttgaatacacactcacatacgcattcatataacacacacacactctcctacatacaatgcataaatcttagaaagatttctaaactcttagcccttagtacaactacagtattctcaccaaattacattcatgagcaagaaaaaaattataatctttccacacagtttctctttaattggtggaattaaatgcagttaattcgaggtaagttctagaggctccttgacttgtgtcctctctgcagggagtggttacactgctgctgggatgccccagcagcccaggcaccacctccttgcacaataatgttcaaaagcaggaaaggggctgggtgcagtggctcacgcctgtaattcccagcactttgggaggctgagacaggtagatcacctgaggtcaggagttcgagaccagcctggccaacatggtgaaatcccatctctactaaaaatacaaaacttagccaggcatggtggtggccgcctctaattccagccactcaggaggctgaggcaggagagctgcttgaaccgggcaggcggaggttgcagtgagccaagatcgtgccactgaactccagcctgggtgacagagcgagactatatctccaaaacaaaagcagaaaagagactttcttcccatcgtgactctttttatcatagaggaaattattccccagatgtccctccccactcctcgattccggactccaccccagaccacagctggtccatattattcccatgtctgaagcagtcactcacactcacacagggagcagaatcaaggtgactgattgaaatcagcggttctcaaagtgtggtcctagacaaacagcctcagtgtcacttgagatgtggaaatgcaagttcccggtcggcacccccaatatattgagtcagaggctgggagtgggtcccagcgatgaagccagaatccgatgcagcacaggctgtctggagcctgcatacttggtactgcatgttggattaaggctgtagcagttgaacacagggaagagtgcagattgtacacctttctggagcttccctcagaggctcacaggtagaggcagcgtgatgcagcagttcccagactttttgatttcagagaccagaaaatttacagatgaaaggcaggtggggctgcagtcatttttttgtatttgccaagtcagtatatgaaaaatattatcatctactttagccttcatttacataataagaaacaccacaccaaaaaaggatatgaaatcagaataaagcactgtcttttatttttatttattttttttagaggcagggttttgctttgtcacccaggctagagtgcagtggcgtgatcatagctcactgcagccttgaataaggacagtcttttaaataagacacatttagctttattgaaagtttacataacatttatcctatttttctcattttgccgctgaccaacagaaaatataccagcacttaagagccaccaatgcgggaaaagctcgcactttgtgcaaagtcagatccggtttgaattctgtctcatctcatgtagatggtctgtggccttgggaaatgtttttacctttatgaacctcaactttctcgttactaaaatgggaattataagtaccttgcaggattttggtgagatttagagataaggaaaccaaccacctgatctctggaagatgggtgtccaatcagtgggggctgggaccatcagaaggctggctcagtgttattgactgggctcatgcacgaatgaatggctagcagagacaaaagttcatgatctgtttcctcatttatttgagacaaaagggacagctgaactattttaagcaaacccacgtgtatggactagacgacactcagaagacaggaaggagagcatagaaatgggtcacagaatcaccaaattattcttgggataattgtttggattcctaaagttcaaccaaccttgggggtttgttgaccccaaacccctctgccttcaagtgtttggaatcattcagaaataattccagctgcttaatagcctctctgtgactgacaaagccctgttgtgagaggaacaaggtattgcagtgttacgtgctgagtgggtgggcaagaggaaggatagttgtaatatcgcggtgcaattctggcactaaccacctggaattaatgcagatttcacaggtttaagagcagagtccccaacaagatagctctcagtttggatgccagctgcaaggttgggggtccccatactacctttactttgatcaactggctgcaaatatgagggttcctgtgacctcctccagctcaataatttgttagaatgacttgccagaactccggaaagtgccatactcatgatgaaggttatattatataggaggctagccagggcccaccaaatgaggagacatattggataaggcctgggagggtcccacatgcagaatatctgtgctgtctcctcctggagttacagtgcaacactctcctggcacattgattcttttcaccaacgggaaggctccactgagtctcagcatcctgagtttttattggggtttcattatgtaggcatgattgactgaatccttggccatgtgattggacccaatcttcagtctccttctcctccctagaggttaggaggtcaagctggtcacacatggctcaaatcacatgtttggtctttctgctgatcagtccccattccaagtcattctcgttagcgtaaactcaggggtgatccaaagggttcgtgaataacaaagataatcctattactcaggaaattccaagggtttcctgtctgtctccccaaaatcagggacaaaagccagtcaaattctttattttaaaatagtagctaatggtgcaggcatccagaatcttaaaccttggcctgagattgttgaaacaagacaaaagttaatgtatgaagtctctactactcccaagcatgaactgtaacattagaccactttttaatttcatctacttacttatttagatgggggtctcactctgtcacccaggctggagtgcaatggcatgatcacggctcactgcaggttcaacctcctgggctcaagccatcctcccacctcagcctccctagtagcttggacggcagacatgcaccaccatgcctgtctaattcttttattttctgtagagatgaggtctcactgtgttgctcaggctggtgtcgaactcctggctcaagtgatcctcccaccttggcctcccaaagtgctgggattataggcatgagccattgcacctgggcctagaccactttttttttttttttttttttttttttttgagacagagtctcactctttttgcccacactggagtgcagtggtgcaatctcagctcactgcaacctccaccccctgggttcaagcgattctcatgcctcagcgtccctaatagctgggattacaggcatgtgccaccacaccagctaattttcatatttttagtagagacggggtttcaccatgttggccagactggttttgaactcctgacctcaagtgatccacccaccttggcctcccaaagtgctgggattacagacatgagccaacccacatggtccttagaccactttttaactgtcaccatattaggcagctcctactgccagaacaaaatcccatagactgggtggcttaaacaccaacatttatttctcacagttcttgaggctagaagtccaggatcagagtctcggcaggtttggtgtctcctgaggcctctctccttggcttgtggacatccgccttctccctgtgtcctcacttgacctttcctgtatactggagtatccctggttctcttccccttcccagaaggacccagtcctataaggactcagtcccacccatatgacctcatgtaacctgaattacctcctaaagatcctatctccaaatacagcacattctgaggtatgctgggagtaaggactttgggaatgaattttaggaaggcacatagttcagtccctaacagtgacctcgagcaaatgacctctttaagcaattgtgaggtattaaggcagcaatgtgtgcaaagccacccaccacagagcatcctgagacagccatgggcctcactccgtcatttttatagggacacactgtgctgcctgggatgggcctctgctttctgcacctgggaagtccatgcttcacaggaatggtctgctctgctctggctctgaagacagcaggctcagtgtttctccagggaaagtcgggcctccagctggggcagcacacgccggctcagacctgagtcatcactctggtgttaggagtccactcctcccaatctcaagcactgcgggacatggctggtggctcaaggcccccttcctttcctgaaccaggagcctgtatgccgtgagctatgatgtgggcctggcttgctgagcctggagccggtgtgtctttcacatgaccatgtggcaatctggaaaagtccatgtgtcttaagctctcagtgttgtacaagctgaaaggagaaagaaaacaggaggacgccaatggtacccaaagccaacttaactggggtctcagtgaaaaccttaggactttacaactacatctacagatgccctctgcattactctggtgcacgttttatggcaggaatcctgttggcagagatgaccacagaggaggatcactcagaaagcattttctcaaaaactataatttctttagtctcctgttcaggtggataattaaataaatggtgattttcccaaaatgcctttagaaatggtggtcctggctggatgtggtggctcacacctgtaattctagaactttgagaggccaaggtgggaggattgctgaaggccaagagttcaagagcagcctgggcaggacagcaagaccccatctctaaaaaacaaacaaacaaaaattttaattagctaggtgtggtggcatgcacctgtagtaccagctactaagaagactgaggtgggaggatcacttgagcccaagagttcaaggctgtagtaagccaagatccaccactgtactccagcctgagtgacagagcaagaccctatctctaaaaaaaaaaaaaaaaaaaaaaggaaattattcttccagccaagccctaaagtcatattaatcattgcatttatcttaatcatcattggatggtttttattcaatgtcctggttaaggtcagtattttagactgtataataaagaaaacgggcaatgtccccatctcccaggaacttacagtctaaggtccatattgtaaggtatgtagcaaacagaacataggcaggcgcggtggctcacgcctgtaatctcagcactttgggaggctgaggcaggcgtatcacttgaggttagaagtttgaggctagcctggccaacatggtgaaaccccgtctctactaaaaatacaacaattagctgggcgtggtggcacatgcctgtaatcccagctacttgggaggctgaggcaccagaattgcttgaacccatgaggcagaggttgcagtggggcaagatcgtgccactacactccagcctgggcaacagagcgagactcaatctcaaaaaaaaaagggagggagggggaagaaaacagaacagagaggaagcaatgcaacaaactgagaagcagagcagcaagagacaagtttacaaaaggagatcataaatggcacattgtggctgggcgtggtagttcatgcctgtaatcccaacacattgggagggcaaggcaggaggatcatttaggcccatgagtttgtgaacagcctgggcaacacagggagatccccatttctaaaaaaaaaaaaaaaaaaaaaaattagctctgcatggtggtgcacgtctgtagtcccagctactgggaagcctgaggcaggatggcttgagcccaggaggtagaggcttcagtgagctatgatcacgccactgcactcaggcctgggcaacagagcaagatcctacctctaaataactaaataaagagatagcacgttgtaattcagcaatctttcctgtgatgtgttaaatagggagatgattagagaagaaaaggtgtgccctgtttttcatggaaaggaaggttctagaagagctaagcctgctttcttcctccatccccttaagaggtcttcattgggcaggtcaccatagtagccaccagattcctgattgctgtcatgtcatcagaacaggaagcaggaagaagagagtgaggaaatgaagggaagatagaaaatatcgaacccaacagttctgtgcaaccagagatgtgtgtgttaagggtacaacttgcagaagaggagtgggattgggattggatggaggaaagctgggcgtagtgcatgatggtacaatattcacatcttcttgttgaatgcaaggttgcactgtcagtcagtgtacctgtgaacatactggtgcccacaaagagatgagatggaccttgagtaatgacattgcctgagtggataagaaattagaagctgcctcatctggccaactgttagaaaaagtacagtggctgcaaatgtgaccccgtgatcttttgtaactgctgtagtctccccactgccagctttctgatctgtggaaagctctaaacagtttcattaaacaaggtcaggaatcttggctggaattcttggcttctcagggcttgtcatgggagaggccagcactcgaggcccaatcaggactccagaatccaagtgtcagggcccctgaaccttgctgggctcggcccagtaggctttgggagaagtttctttgcagctcactgaccatattaagggagggagaaaggcagcagttagggcagtttaaactggtatttgtaattttgggtggttgtctcaaagagcaacccccttgaggaaagcatttctggagccagtatttccaaaaatgtgctggagaggggtctgcgtcaagtaagtttgggaaatgcctcaccatcctcaccatgtgttcccatgtgagatgtgggcacatttgcttaagaaccactgaggaaccggccgggtgcggtggctcatgcctgtaatcccagcactttgagaggctgaggcaggcagatcatgaggtcaggagctcgagaccgtcctggctaacacggtgaaaccccgtctctactaaaaatacaaaaaattagccgggcgtggtggcgggtgcctgtagtcccagctactggggaggctgaggcaggagaatggcgtgaacccaggaggcagagcttgcagtgagcccagatcgtgccactgcactccagccttggcgacagagcgagactccgtctcaaaaaaaaaaaaaaaaaaaagaaccactgaggaaccctggagtgaagacccctggttagtcagtctttccaggccctccttgccatgaaaaaccctccctcctgggccacaaactcattttggggtatgtgacttcttcagttgtggaggaacaaggacccgatgtaattaacactctgggaagtgctataactggctctgtcaagaccatgtgagacctattccagctctactaggggtaacgggtggctccaaacaagccacttcgcatttctgtttctctgtttcctccccgcgccccccaaagaattgtcaatttctgtaccacctctttttccttcccaggaaaactaccaagatcaaggaaatgacataaaaatgctttgggctgtggtgtgaccaaaatgtcagatgagtgctatgagagtttcttccaagacagactgatgtccatcccttaaagaataaccaaaatcctggcccggtgctttggctcacacctgtaatcccagcactttgggaggccaaagcaggtggatcacctgaggtcaggagttcaagaccagcctggccaacatggcaaaaccccgtctctactacaaatacagaaattagccaggtgtggtagctcacacgtgtagtcccagctactcaggaggctgaagcaggagaatcccttgaacccgggaggcagaggctgcagtgagctgagatcgtgccactgcactccagcctgggcaacagagtaagactccatctcaaaaacaaaatcttgaattctctgctgaagtgtttagtgccaggctcatagtagacactctctaaatacttagtgaattaatgaataaaaataataatacaatggtccccaacctttttggcaccagggacctgtttgaaggaagacaatttttccagactggtgaaagggggagggggatggtttggggatgattcaagcacattacatttcttgtgcactttatttctattattatattgtagtatctaatgaaataattctacaacttaccataatgtcctatcagtgggagccctgaacttattttcttgcaactagactgtcccatctgggggtgatgggagacagtgacacatcatcaggcattagacacctgatggagcacacaacccagatagctcgcatgcacagttcacaatagggttcatactcctatgagtatctaatgccaccactgatctgaagggaggtggaactcaggcaataatgcgcgatggggagctgctataaatacagatgaagcttcactcactctcctgcgactcaccgcctgctgtggagcccggttcctgtactggtccgtggccctgggggttgtagattccagtaataatatataaggactatagaactatatgtaaaggtatataaccacatataaaatgatgactgtttacatgccaggcatacaaccattacccttgtaagttttcactaattcttgaggacaaccgtaggataaactgttgttatctccatgctactgttgaggaaactgaggcacaaagagttaagtaggttgctgaggttcacacagctccacgagtgaagtaactgggctcaaagccaagttcggcggccatcaaagccctcctcttaaccattacacttgccgctgtgctgaatgaatgcattttgaaaaggataagaaagcatatttctttctatgcatcctaatgacctccatctccggccaccccctggcagcctcactcttgggtcttagatagatgatatcatcatgacatgttttccgtgcacgctgctatcacggggaattatctgattgtctggaagtccatttgctaaagtgggacaaagggaaaaactgggcagagaagaatttcggaggtaagaatgaggtcttgtgtagtcaagaggggaaatgttaaccctgtcagcttaaaaagccatgtgcctctgtctctcgctcatttaaatcacccactgttaatagccttcctggaaatgtgtcccatggcaacacaggctggtctcagttccctgttcaccccctgtggagccccgtgccttgttctcctgacgtgctttgtaatgctgaagatgactctctggaccagaaatttcagacgcatcaatttcgtcttccctctgccccgagggatgaagtcagttcttcaaaagttttctttctaacgtcaggctttcaaattctggtatcctttgactattcagagattaatacttagaggaactccaagaagcctccgggggaaggggcttgatatctcaccatttttctccctcctggagaagagcacaaaggactgtgctcatgtctgcaggccgggttttattttagggaagacgggactaatttgtgtccagagaccggtttcttaggagaactggttaggctgcctggctgcttgtttttttggtttggttttgttttgttttgttgttggtggtggtttttgttttgttttgttgttgttgttgttttctgagatggagtcttactctgttgcccaggctggagtgcaagggtacaatctcagcccactgcaacctccacctcccaagttcaagcgattctcctgcctcagcctcccaagtagctggaattacagtcacccaccaccgtgcccagctaatttttatatttttagtagagacagggtttcgccatgttggccaggctggttttgtactcctgatctcaggtgatccacccacctcccccgtggcctcccaaagtcctgggattacaggcgtgagccactgcgcctggcctgcttggtgtttttcaaatcagcttacacattcccaaggaggaggacatgtctccttctgcacccactttggacttaacttttaagcgcccagaccctgcctctgggtcagactacctggctttgaggcccagctccactatgtcatagccgggtgacctttaatatgggaatgatcataacaataacatctgcctcatagtgttgttgagatgattaactgcaattctgtatagattagtgggctcttgtaaagacttacgagatgctaggcattgttctaagggctttctctgttagaaggcttttgatcctcacaacgctccaatgaagcaggtactgatattgtattgacaggttcatttaacctgcctgaagccacacagtcagtaaggagctcccaaatctgggcccttaaccaccgggcacagggcagatgccccatgaatgtcaggagttatgtggccactctgtgagctcctgaaggttggtgatatggtttggctgtgttcccacccaaatctcaccttgaattgtaataattcccatgtgtcaaggacagggacaggtggagataattgcatcctggggacggtttcccccatactgttctcatggtagtaagtaaatctcatgagatctgatggttttataaatgggagttcccctgcacaagctctctcttgcctgccaccatgtaagacttctcttgctcttccaccatgattgtgaggcctccccagccatatggaactgtgagtccattaaacctctttttctttataaattacccagtctcaggtatgtctttattggcaatgtgagaacagtctaatacagtcagggaccatggcttcctatggcagatccatggcacccatcaccctacccagcacgagtgggtgctcgataaatactgttctgaatccagggagacatatgtgtgaaggcagactgtacacggaaaggcatcagcattctaattacatcgcaaatatgcatttccccacaacacagtgattctttccagatgctcattcctagttgcactcattagaatcaaccgattcccactttaggaggctgaggtgggaggattgcttgaggctaggagttcaagaccagtctgggcaacatagcaagaccctgtctctataaaaaatttaaaaattagccaggtgtggtggcattcacctctagtcccagctacttcggaggctgaggtgggaggatcactcccacctaccccctggcctgcaggcctcaccctctagtcccctaggggtgtgcttggagatctaggccattcccagcttcctagcaggatcccaagagttcaaggttgctgtgagctataattgtaccactgtacttcagcctgagtgacagagtgagaccctttctctaaataaagaaaaagaaaaaagaatccacagattcctcaacccacccaagaccaatcaagtcggaatcccgagggtgccccaggcatctctggctttttaaactgccccgctgattctaatgtgctcgcaaggctgaaatcactaatttagaagatccaggtgacatttccgcacagacctcctgcttcctgttctgaaacctctcactctggacgaagcacgagggtctgtttggaggaaggaatcctaagagggcagtggacaatccttgatgctggtattgctgtggacacacgggaaaggcacttcaatcaagcagctagaaaggacagcttgggatgcagcttggaagagcggccgagagggagcagccgaaagcaggcaggaaaagcagtgtctgagttcacccccggtgagctgggccggcaactcggttctcttggtgtaattcattggttctgctggtgtaattgatcatcagagcccacctcactcatgcacattagaatggaagtccaggccagggttttcattttgcttttgttctgtttgatttttccctccactctgacagaggaagtgaaagtcttgaagattacgtgccagcaggagattgctgttgtttggctaaaaaaagccctgagctcttggcctggatgaattctgatagaggcaggagtccacccagcactgtctccattttggagtagctcagcctctcccccggtgaatgcctgggtgttcccagacaatggcaactgggagatctcctacccaaaaaggaagcaggataaggatgtaatgaggatgttgttaagaggttggcatggggaagggaaatgcacagtggacgtgtggaaggaattaacaagcagtaagtaataattatgtgtcaagaactgagttacatgtcccatacaccatcttatttaactccatggtgtccagaaagttggagatatgatgtccactttacagaaaagaagctgaaactctgggaagtgaagctactgggtcctgatcccacaacagttcagaaaaccttaatgccagtccaagtctgtgacttcaaagccttcttgtttcctaacagcaatcttaagttcttattttatttgttttagagacaggaccttgctctgtcacctagggtagagtgcagtggtgcaatcatagctcactgcaggcctcaaactcctacgctcaagcaatcctcctgcctcaacttcccaaagtgctgagacctcaggtatacaccaccatacctggccaatcctgggatcttcaggctgggatttgatgcccaggtccccagatgaagaccggtaaagttgatgtcatccaaagaaggtcagaggcattgcgtttggtctaaaactccacagggactgtagaagtgagcgtcctgcctctctgtgtgtgtgtgcctctttgtctagctaagaagtgtcaggtctggagtgatttctaaaaagcaaaattggccaggcatggtggctcacacctataatcctagcactttgggaggccaaggcaggtggatcacttgaggtcaggagctcaagaccagcttggccaacatggcaaaaccctgtctctaccaaaaatacaaaaattagccaggcctggtggtgggtgcctgtaatcccagctacttgggaggctgaggcatgagaatcacttgaacccaggaggcagagtttgcagtgagccgagaatgtgccattgaactcctgcctgggtgacagagcgagactctgtctctaataataataagcaaaacttatgacaccaagtactcctgtgcacacatacacacacacagggatgctgcgtgacatggaacatgaacatacatggtcaggcttcccatttctctacacctcccgctttgctttctctggtaagtagggcaaggcctcccataaagccttcaatggcaatgctggggttacattaacgtgtcgccttgtgctggttctgcagggggcagcactggttaaagggagccactggaagtgggctatggatcccaccttctctgttaaaaccatagaactctgtggcccacagtcaggacaagaaccttgacctctcatcttggctcagggctcattcagagtctatagtttggctttggagaagctctgggagaaagatgcatgcttgctgttttttcaccttcttgttctaacgctgtcgccttcccaattccttgactccttctggagtctgtcagaggggctggaaaagcagcagcccagacaacaaaatctcttttgtgcctgtgacctggatggtagtgacccttcctcctgcaaatggagggaaggagggctgaggagggacagcgccctgcccgatggatgctctgcctggcagtcagtgacacttgtggcagtgaggtcatggccttagatgatttctctctctgcagactgacacactgttatgaatgtaaagcgcgttatctcctccagagagaacatgtaaggctaagagaaaggaagagagagagagagagctagggcatgtggggaagcacacagtcaaatccccaggtgaggtcactgctaggatccgatcaggtgccagcgacaggaaggggtcagaggtcttctgcactgcatgcaaatcatttcctgaaaagtcttcaaggtcagtgtttccagtggcctggccaggcccccgatttattttggtgaaacacttatggcaagaagagtcaggcaggtgacagaagcaaagatggggatccatgcctttctcctggctctcctgaattcccacagatgggtcttccctgcacatgttcagctccacttactaagggtggttggggctaaaggtgatggacctaggctgcacccatatctacaaatagaggtttccagtggtgaaagacagccctgaaacctactgagagagaaggcatccctagcattaggaagcattgaattgagcaggagttagaaccagcaggacatatgaagtcactgaaggctcctgtgaagattgagaagggcttggacgtgggaacagaactcaagggaacactggtttttgctttttgcctttttttgagatgggacctcactctgttgcccaggctggagtgcagtggcacaatcatggctcacagcagcctcaaactcctgtgctgggaccacaggcacacggcaccacacccagctaatttttttattttttgtggagatggggtctcactttgttgcccaggctggtctcgaattcctggcctcaaggagtcttcctgcctcggacccccaaagtgctgggattagaggtgtgagccaccatgccctgccggaagaatgtttttcgttttgtttatcaatgtgaaagcttctcctgctaaaatcctattccacctcaacattcactccttcattcattgatccatccaggccatcatttaacactcaccatttgggtgaggcttggatgtggagaaaggggaatgcttatacactgttggtaggaatgcaaattcatgcaacgtctatggaaaacagtatggagatttctcagagaactaaaaaccaaagaaccatttgacccagcagtcccattactgggtatctactcaaaggaagataaatcattatatcaaaaagatacctgcacttgtatgtttatcacagcactattcacaatagtaaagacatggaatccacttaagtgtccatcaatggacacttggataaagaaaacgtggtggcctggtgcagtggctcacgcctgtaatcccagcactttgcgaggccaaggcgggcggatcacctgaggtcagaagttcaagagcagcctgaccaacatggagaaaccctgtctctactaaaaatacaaaattagccaggcatggtggcacatgcctataatcccagctactcgagagtatgaggcaggagaattgcttgaacccaggaggcggaggttgcagtgagccaagatggtgccattgcactccagcctgggcaacaagagtgaaactccgtctcaaaaaaaaaaaaaagaaagaaagaaagaagaaaacatggtatacatatacaatggaatagtattcagccatcaaaaagaatgaaatcatgttttttgcagcaacgtggatggaactggaagtcattaagtgaaatagctcaaaaacaaaaagccaaatacacatgttctcacttaaagtgcacacgtggacgtggagtgtggaataatagacattggtgacatgaaagtgtgggagggggtgagggatgagaaatgacctaatgggtacaacggatgctatttgggtgatggatacactaaaagcccagactttgccactgcatagtatatccatgtagcaaaactgcacttgtaccacttcaatgtacagaaataagaaaaaaagagatgtggataataccatccctgctttcaagatgttgccatccttgaaaaggcatggatttagaaaaaaagatggaaatgtggtaggacagtgcctcagacgaggcctgctggagcttggagcactctgagagccccgccatgagcagctgagcaaggcagctctctctgcagaggggctacagagcggggtcttgcataaatggtatttgggcagtagagacaggggaggggcttcgagcccaaggggctcggagcagccagacagcagttgagcccagcattaaagagcagggctccccgaagcaggcaggagcagaggggccccttctccctcctcctctcccactcctcctggcgtgcgggcctcaccctccaatctcctgggggtaggcttggagatctagcccattccttgcttcctggcagacttacagactgccggaacctccgaacccctctctcagatcccagggcccttggctcagctcatctgcttttgctttcttgaccgtgattttctgaacattcctacctcttggcttatcagtctgcaggaggctgtttcgctttgcctgaattgagactgacttcatatttattatgtggtttggcttcagaatcaagacaaaatgtcagtgccaagctgcctaatggccgacattagcatgcgttaaaaacctaataaaacatcgcctccaaaatttcaggccaaattcgcttatgtaaatgtctaacatcaggtctcacccagaatatcctgtcgggtttcgggagatgggcttgaaatctgccccaggctgtgggaacggcgcagatcgtgcttgtgtgctgggctttgttgggggctagaccatgagacatttcatgccagccacatttctggttttctctgaaactgtgttgaagccatgatgcctgataccccttatgtgtacttcttggaaaaagctaacccgtttcttttgtctgctaacgaagcttgtgtaacttcgcgagatctccctctacagagtccaattctgtgccctgcagtagaaattcatttgtctcataaatgcctcaccgtcttcagtggactttgtcttacttaagttcctaatccccctattctgtgctattttgaattccgtaaacctcctctaaacctttggaagtatgtagaatatagaataaattaatattttcagtccaggatggagggtgttacagactcaagttttctttggacccgaggacacgtgtctgttttcatccattaattacatgccagaagggaaggggctgtgtggcttttacatccttgctcgcctgactttcatgaaaatgctgtttaggaataaatatttttcagcccagagttgatcttccctctttagcctcccgggagagcagtatcggtactgtactttttcattactcttctagcccagtaagggtgtctttttaattgtatcgaaaacgacatcatcagctgagcaaaatgtatctctctaacatgcacctgccagtcatccacaagagccatggggaggtaacgctttagggagaggattcacaggggagagcacttagggaacttccaacttaaatgaaaagccagtgccatgtctctgggcgtatcactggggccggagagggacttctttttcttctggccaataaatggaattttaaccccaaagaaccaataggcagagacaggtgcaaggaggagaaatcctatagtagatgcagcgggtatttctgagcagacactgggaataagaaagtatgctgtgtagggcaaggctgctcaaataagtttaattccaagggaagtggcctgcgttctattcccctcaccgtgtagtgatgatttattcatggttcccgagatgaaggatgacagctcaccctgaagggtatttagattctgatcagagaaggtctttgtcaaagtgaggaggggataattttaatagggattcagttactgattaagaagaaagggggaaccctcatttactgagcacctctcatgtaccaggtcccttgtgaatgatcatttattgagtcctcgtgacagctttgggaggtagaggttattgttgcaatgttcaaagtgaggcagatgctgatcaaggtacacatcgggtagaactggctttcagagccctgaaggccgattacaaattcaccacccagattccatgaaacagacacgttttaggagaatcacagcacagttatcccttggcatccacagggcattggttgcaggaccctgctaagatgccaaaatcatcagatgctcaagtccgttagatgcagtagttccttcttatctgcggtgttactttccacgtttcagttatccacagtctgaaatgattcaatacaagattccagaaataaaccatctgtaggttttaaattgggtgccattctgagtagcatgaggagatctcatgctgtcctgctccaccctgcccaggacaagaatcatccctttgtctggcattgccacactgtatagaccagtgatccccaagctttttggcacaagggaccagtttcatggaagacagtttttccatggaccagggtggggaggggcaaggatggtttcaggatgaaactgttccacctcacatcatcaggcactagttagattctcataaggagcatacaacctagatccctcgcatgcacagttcacagtagggttcgggttcccgggagaatctaatactgctgcttaggtggtaatgctcgcttgcccactgctgtgcaacccagtttctaacaggccacggaccagtactggtctgcggcccggggtttggggacccctagtgttgacgctccccacctttagtcagttagtagccatctcagtgatctgatcaactgtctcaggatggcagcacttgtgttcaagtcaaccttacttgatttcataatggcctcaaagtgcaagtgtagtgatgctggcatctgttagaattgttgtattttattattggttatggttgttaatctcttactctgcctactttaaaaattacactttatcataggtatgtatgtataggacaaaaagcagtatatatagggtttggtgttacccatggtttcaggtatctactgggagtcttggaaagtgtcccccaggaatgagggaaaaatgactgcaaagtgtgatgtcatttgcatataacctagacacatcctcctgtatacttgaaatcatctcttgattactcttttttttttttttttttttttgagacagagtcttgctctgtcacctaggctggagtgcaatggcacaatctcggctcactacaacctctgcctcccgggttcaagcgattctcctgcctcagcctcctgagtagctttgattacaggcatgcaccaccaggcccagctaatttttttgtatttttagtagagacggggtttccccattttggtcaggctggtctcaaattcatgacctcaagtgttccacacacctcagcctcccaaagggctgggattacaggtgtgagccaccgtacccagctgttactcttaatacttagtgtgatgtaatgctatatagttgttatactatattgttgtgttatttattattggtgtattggtttttatttttatctttatttatttattattttttgttttgagatagagtcttgctctgtcacccgggctggagtgtagtagtgcaatctcagctcactgcaacctccacctgctgggttcaagcaattctgcctcagcctcctgagtagctgggatcataggcacgtgccaccatgctcagctaatttttttttttttttttttttttgtatttttagtacagatagggtttcaccatgttggccaggctggtcttgaactcctgacctcatgattcaccctccttggtctcccttagtgctgggattacaggcgggagacaccgcacccagcctggtttttttgtttttaagtatttttgatccatggttggttgaatatacagatgcagaacctgtggatatgcagggttgactgtactaatattttttctgtaacttaatcttggaagtgatatattattattttttaaccccctctgaacttggctctcaccaccatcctgctaaaaggcaagctttccctttccagtctgatggcaatagagacacagtcttcgaatgccagccacagctgaggatagcagatgtcatacgagccacaccttccgtccgttacactggaaaagtagcaagtggctggtccctgtgttcttggttgacagacactcttctctgctcttccttgaacatcgagcaaatggaataattcagtgtgcagtgtcatgaagatatctagtttgagttggtcctggtgtcatttggccccgtggaaaggtaccaatctgccaatgtgtcatttgatcttatagaacatacctcacctcccagtgagtgcacgggcagcttttatcagaaatagtgatttattactcactgcaggacaagatggggtcatcacagagtctgcagggcaggctttcttttaacaacaacaacaaaaaaatggaagtggcagaccagatggccatggaagatggagcttggaatcccaagatgttgcttcgtttatcatccccatattttctataaatatctcagaatttgggctgcagacttggcagtcctatctggcagaggcaggttgagcactgcctgtctttttctgttttctccttaccgaaacagttatcatttcattaatgcagagaggcttgccaaggggagccacgctagactcacagtcctggtgacattgccctgagcaggctggagtctgggggttgctctattcatcaggaggcctccctaatgaacacctgcccgcctcccagagtcccccggggatcatgaatagagcaggctccccagccggctggctggcttgtgagcactttgcatttctagaggagcaatcattatgtacgcctgtcaaagccttcccattgggcatcattcaaatgcatggatgagaaagcctccctcccacatgggtatcagtcccaacttttcagagaacacagggaccagactgcatcttaggaaaatatggaagaaactatgtggaaataagaagatgacacccagggaataaaagcataaaggggaaggagagggacaaatggggagactaaaagcattgctcccagggagacctcacccctgggttaaatggcagagtcacttggaaggagagagagaaggaggggagagagaaggagctattaaagggagctgtgactttgttggtttggggaggagttgggtgaggaagaagagggcacagatatagggtttgggaatagggacatgacatatcctttcctggggacacaagtatctgtcacaggccccttcatggctgcctggagctgtgtgatctgattgaaacccagtggctctctggcatcagtgagcatgcgacacctggtcccatctggctctgtgcagcaccgcagtctctgcctagcagatctctccttcaaaccagctcaagagggtgtccaggttccatcctgtctcgtggtagaacaactgcatatgccaccctttattctgtcccattctaccaataggaaactttcattaggcacctactgtgtgtcagggactgtattggggtgtaagtccacaaatgtcgatcaaatgtgatccctcccttccaggaacttactgtctggcaaaattctattgcatttagaaaaggtggcttggcttttgacttcaggagaggctgttatttgctagatctgaaccccagaatttaaaagcaagcaaagctttgtttaggagatctattgtacatcgtggttattgtagctaataacgatgtcttcaatgcttgaaaattgctgagagtagtttggaaatgttctcgctacaaaaatcgtaagtatgataggtgatggatatgtttattagcttgatgggtcagcccacatgtgcatatacatgaaaacatcatgttgtacatcacaaatagatacatacatatagatctatgtgtgtacatatgtgtgtgtgtatgtatatatatatatatcgtttccatttctgtcagtgaccacttttacccctttccttgatgtactttgtttctttccttcctgcttcggatcttcgagacctgctctgtcccctaagtgtaacattagcgggggcaaaggatggaggtgtggcgggcacttcggggccacctcacctatgctggtaaccaaggtgcccaccctcgtcctggacaggtttctggcctcctctaggctttcctttctgctgccgtcatgaagtgggctgggcagatggtctctctggctcttcctataatcctgggtgacccatgcccacctgtgtgccgcggttcagttctcccactgattcgctgtgtgaatttggcgagttgcttctctggctgtatctcagttccctctatcacatgggggcaatcctggtgtctacttcaggtgtttctggtttctagggctggctgcatgaattcatgtgaagtagcagctgcaggcggggacaggtgggcagtgttgttggcagctttgctgttctgctgcagcgatgtgatgccactgtcactcctagactagaggtaaaggatttgtctcatgtgcacgaatggatcccggttcaggctgggcagggacctctgggtaaagagatgccacctctggcaggcgggtctctgatcttggcttcggggtctctcctacctgttctgggtgcctgagagccaagacagtgcaactccattgttcttcacacccgtctgcctacaggaagtagcctccctgtgtcccctgccacagaacccagggctgtgctggagaggcaggaaggaaaccagccttcccagctaagcagcagggcgacaaggaggggagtcgccgcccagacctgctggccacacagtggacagagctgcacagagtcacctcatgcaccccccgcagcagcttcccctccccgggaataatgagcagccgctgagccattgctgggctcagagcccccatggggatggagagggacacacagtgacagcccaggcttcagacccggcagcttgctcaggctcatttattcaaagctgcgctccttcccctgctctttccctctgggttttccgaaaagctaaccccggcccctcctgtccagagagatgggggcagacgggccacgtttcacagtcactcccagacagcccctgtctgccatcccacagctgcacccactcctaaagggcagggagccacccatccagcaggtcccggggtcccgggcagagtggatgggcaggcagtgctgggcacagagcggcggctgtggctgtgccatccggccatgcgtgtccaaaccctggcagcttagcagtcactgggggctctgcagtgacaaagggattgtcaaaaaacacccttggcgaagagcaggagctgagagtgtcactcttcagaggagaccgtggttcctcccaaagcacagatgggagtcacctgatggttactgcttgtttgctgtttgaattttttttttttttttgagatacaattaactcagaagtggcaactcttttgacttagaatctgtgagatgccccaagggaataggttaacaagaagaagcttaaggggcctgcttcaccatggagtgacccaaggtcggctgagaccaaggcccgcctgccttcccagcccagagtgccacagggacagtggagagagaacaccaatgtcaatgcaggcttcgcactgagatcactcatgtcacaaccaaccagtgctgagttcccttcaattacacggaaacgaggtcttcggggtttccatctgagggtgtatgagtttcctgtgtctgccataacaaataaccacaaacctgatggctggaaaataacagaaactcactctcccaaatttctggaggcagctggaggggacaatcgcttccccacctcttccagcttctagtgactggggttcctcgcctgtgtcttcatcactcatcactcaggtctctgcctctgtcttctctcctgtatgtctgtttttaaaaaaccctctgtatctctcttataaggaggcaatatatcccaggaccttgggaggccaaggcaggtggatcccttgcgctcaggagttcgagaccagcctggccaacatgttgaaacgtcatctctactaaaaacacaaaaaaattagctgggtgtggtggcacatgcctataatcccagctacttgggtggctgaggcatgagaattgcttgaacctgggaggtggaggttgcagtgagctgagatcatgccactgcactccagcctgagatcgtgccactgtactccagcccgcactccagaccccatctcagaaaaaaaaaaaaaaaaaaggagacaatataatggcacttagagcccaccaggattagttcctcctcccaaggatcacgtcttttgtgatgaaaggtaatactcacaggttccagtgactgggatgggtacatatgtttttggggaccaccattcaacctgctatagagtgtaacaaatcatgtcacacaaagtttaccacaacacaagagcacatgtgccaagtgtgactaagctgcctgtgttgagtgctgtagaaatccagaggagggagagagcatttgtaggcaggatggtcagggagggcttcatggaggaagtgggctttgagcaggataaaatttaaatgggaagggggagggggagaatggaatgtacaaagatttggaaataaaaatgagatcagtgttttctttagttcaatcaaatagattgaacagaaatggatatttttgtagggaactgggcaaaagtgaggttggataggtaaactggggctgggttcatagggtggtcttaaataccaggctagcatttagaacttgatactatatggagtggggatttttttgttttgttttgttttgtttgagacagagtctcactctgtcacccaggctggagggtagtggtgcgatctcggctcactgcaacctccatctcctaggttcaagcgattctcgtgcctcagcctctcgagtagctgggattacaggcatgagccaccacgcccagctaatttttttgtatttttagtagagacagggtttcaccgtgttggccaggctagtctcaaactcctggcctcaggtgatctgcccacctcggcttcccaaagtcctgggattataggcgtgagccaccgtgcctggccatacatggaattttttaaataatttatgattaggatctgaaataatgaatacaagtaacgttccatgccaggcatattctaagtacttcatatagatcagactaatttatttaattctcaaaacagccttgtgacctgggtatagtcattatcctcatttaatagctgagaggaaactgaggcacagagaggtttagtaacttacctgaaattatataagaaagacaggatatattaactgactagattcaagagatcatgaaggatgcagatggtgttcaagttttttcgaatgggtgaataacactcttaggaaggcaggatcgtttgtaggaaaggaagaagctaaatttaataataacataaggaataaaggctgggtgcattgggtcacacttgtcatcccagcactttgggaagccaaagaaaaagggtcacttgaggccaggagttcaagaccagcctgggcaacatagaaagaatccatctttacaaaaaaaaatttttttttaattagccagccatggtggtacatacctgtagtccccccctactcaggagactgaagctggaggatcactgatcccaggagttggaggctgcagtgagatattatggcaccactgcactccagcctgggcaacagaataagtccctgtatctaaaaacaataataataataacataaataatgtcttagtataggaattctttttatggtacagtagtccatcattgtacagatgagaaaactgaggcccagagagcttgcgtaatttgtctaagatcatctatctggatagacacatgtcaagtttaagttggtggcataatatataagtgatggtaaataccaggctagcatttagagcttgatactgtatgtagtatagtatactgtggaatatagtattctgtgaggaattggtgaggtgcctgggtgctacctcatccttgaattcctttccccagaatttacctgaagggctcatggaagtcacctgaaaggatgttgtcatgtgggtgtgtgtattagtctgttctcatgctgctaataaagacatacctgagactgggtaatttataaaggaaagaggtttagtgaactcacagttccacatggcctcacaatcacggcggaaggcaaaggagaagcaaaggcacatcttacatggcggcaggcaagagagcttgtgcaggggaactcccgtttataaaaccgtcagatcttgtgagacttattcattaccatcagaatagatgggggaaccacacccatgattcagttatctccacctggcctcgcccttgacacctggggattattacaattcaaggtgagatttggatggggacacagccaaaccatatcagtgtgcctagagcgctttacagccctgcaacacgttaagtgctgttttgatcattctagttagtcgtgtcctgcctggaagaagcaggccaggaagtagtcaggacctgatctggaaccctgtaatatgctgggaacgtgaacagttcccactggaatcatccagtgttctcaagaactcagatctgggtcctggagccacaaagcactgactgagagctcctctcctttcttccctaagtatttagaaccagtgctttcctttccttgctaaagcacatggctgaagcccaggtttctaagcccagttggtgttggaaagactgtcctattagctctgtgagtggtgccactgagaagtatatgttaaggagggatgtttgcaaggaggttttatttgtcaggtatcaggagaaataaaagctaagagggacaatggaaaaagattttgagatacaaaaagaaaagagagaaactatttgattgaacaaagttaattatgggctaagagaaagccagtcttagatgtaatgacctcttagggccaggacggctgatggcccacaagaggctaattctgacaaacccagggagcacaggctgccttgctcacgtggcctctgggctcctgcccagattgtccaatagaatgcgattgggctactagctgcctttctggccttgctcccagtccgatccctgcaaagctccacaaatgtttacagcaccagtaattggcaaattatactcagcgggattctgtaaacatcccttcaaagcacataagagcagattgctttctgcttgcccagcaactttctctgaaggagtttaagaaactttcagaacaatgtagtatattaatcactgtcacatcagcgggggatattgtcttcatttgcaagatcaggaaatcaaggagctgatgccacaaattgttttaaatcaactgtacagaaaataaaagactcagtgcctgaatcaatcaggataggctaggttatgctgcaatgacaaacaacccccaatgtctctgtgacttaaacagtgaaacaatgatgtgtatttctcactctcactacatgcccatccatcaactctcactctcattgacagagcagccaccttctgggctgttgccagtcaccatgacagcagaaaaaatgtgtgtggctttaaaagcagctaagagtcaggagttgtaacctcaacatcttctgggatctattttctccctcttcacggcctttacttctccatttgtaaattgcaagtaataaatgtaggcttttcttcctggaaattgatacatatggtctataataactgttgtgtaaagtaatgggactgaccttttaaattttttaacaaaagatataaatccagataggtacaattgttgaaaaagtttatttgaaaagatgaagtttgttccagccaggcagctactgctcagagccttttccttgacttcagtttatgagtcaccaagaaaacttgttttcttattgtagtgtgacaggctaaatcagagagacatatcaccatggtaaggcaaaaactcagtctccagaaggcttccatggtggtatccattactctggtgaattcttcagtgtgttaagccatctctttattctgcaggctcagaaacctgatttttcattctcaggggaagactcacattaaccaggttgaaagtactgatgtataaatccataatgtcagtgcactggtttcaagtgagtcatgtagccctcactcagccagggcccttgaggcacgatccttaggctctcaccctggaagcagggtcaacagaggtagagtggcagagggattacacatgtgggctttgaaactatcagacctcctttccccctttttcctttttttttaattgtgtcaaaatacatgtaacatcaaacaccattttaaccattttcgtatgtgcaattcagtggcatcaaatgcatacacaatgtcatgtaacaatcactaatatttccaacactttttcatcatccagtacagaaatgctgtaaccattaagcaataaccccccatctgccaccacctcagcccgtgacaacctctattctgttgtctctatgaatttgcctgtttaattacctcatctaagtgcaatcatacaatatttgtctttttgtgtctggcttctttcacttagcataatgtcttcaggttccatccacgtcaggatttcattcctttttagggcgaaataatattccatgctgtgtatctcaaccttgttttgaatcccagcttggctgtgagacccaggacagcctgcctggtatctctcagtctcagaatcttctttggcaaaagaatgataatctctattctggatgataatgagttcatatatgagggacatatccaggatgtaggtgttccttgggaggcatggaattaggagagttcaatgtaacatgatcagctaaagtaaccccaagcctccatttctgccacataaaaggccttaccacccggtaagggacccaaatattcaatacctattggctaagatcacgtttgcttcctgggttcatctcccttccccaactgcacctcccaccctgcctccacttacccccttccattcaggcccaatcattctatggagtgatgaacatatgttctagataaactatgccagcactgggaatcattctttctctttctgggcaaacttatgtatctctgatcaaatctgttgagatgtaggctttaaagtttagctctcttttttttctctctctctttctttctcttgctctctgtttctgtctctctttctttctttcttttttttctctctctctttccctttctttctttttttttttttttttttttttttttgaaacagggtctcactctatcgcccaggctggagtgcagtggcatgatcatagctcactgcagcctcaatttcctggactcaagcaatcctccggtctgagcttcctgaatagctaggactagtcccaagtgcatgccatcatgcctggctaatttttaaatttttttttgtagagatggggtcttgctatatcgcctctgggcttaaaggatcctcctgcctcagcctcccaaagtgctgggattataggcaagagccactgtgcccagccttaaagttaaaatctcaaaaagaacaaaatcttatttttatcgttttcaagtttggaccagacctctcaccataatccccaagaacccacaataattactttgtagtcacacttcattttatgaaactgggttgaccaggcataatcacccattcctcctcctctatctctgttcactagacttgactttaagtgacttttggcatttggaaaaaaaaatcaaatccattctcgagcacaggaagatttatcaccagtgaaaacgcgttgacaaatctgacacaagcctcaagggcaaacccaaaagattatcaaaaatgtttcaagaaatagcaagcatcagagaaatacagtgactactttgaaagcggtagcaatcatttggacaggtaaattatatcacagactgtccctaacctatgatggtctgacttatgatttttctactttacactggtgcaaaagcaatgcacttttagtagaaactgtacttccaattttgaatgttgatcttttcccaggctagcagtacgcggtacaatacgctctggcagcgctgctcagccatacagtcacaagagtaaacaactgatagtctacagtgtactgaattcaataaagtacatgagccattcaacactctatgataaaacaggcttgacattagatgattttgcccaactgtaggccagtggcagtgtttagagcacctttaaggtaggctaggctaagctgtgatgtttggtgggtaaggtgtattaaatgtattttcgatttacaatattttcaacttccaatgagcttaccacgatgtagccccatcataattcgaggagcatatgtatattgcaacttatttatttttattttgagacagtctcgctctgttgccaaggctggagtgcagtgacgtgatctctactcactgcaacctccacctcccaggttcaagagctctgcctcagcctcccgagtagctggaattacaagcacacgccaccacgcctggctaattgttttatttttagtagagacaaggttttgccatgttggccaggctggtctcaaactcctgacctcacgcaatctgcccacctcggcctcccaaagtgttgggattacaggcgtgagccatggcgcccggccactaccttgcaatttaaaaagcagccacactacctcatagtcacaagtgatccagcaaagcctttgttattgggcagccgaatacttcctgggggtggagctagtgctggccacagcccatggcaaacacagcatttaccggaagcttcaagagcacccatcttgcattctacttcgtaattcatcagcgaccttctgagatgtgccacgtttactccactgcattctcgcagagtagacgttccaccaggagtgagggagggtctgacgtatcaccttgaattccctgttggttatagagattgctttttcactttttcaaaattcagtatgaatggaagtatagactatgaggtggtattgatttatcacgttgggttctcctgtccattcctgtctgctggggaggaagcttcaaacccattctttcagtttaagtggttttcatcagtgaattgatggtcatctaggccctgaggctgccacccaggagcccaggagtgagacagaaaagggtggagcatcttctttggctttttaaacttagcgctagctcttactccgtgtccctgttaaaagtctaaggtccctatgggcctgtgctgcaccttgcttatttttctgtctcctacagcatgtgggcagtgccctgtacatagtaggcattcaataaataaatgtctgttgtattaaacagtcatttcaatatcagggtgccagcatggttagctcctggtgagggccacctttgcattttggccccacatggcagagagaggaagcaggctctctggtgtctcttcttataaggacacgaatcccatcttgggggccccaccctcataaactcatttaaacctaattgtctcccaaaggtcccatttccaaataccactggatgtcagagctttaacgcatgcattttggggagatataattcagtccatggcagtacccaaaaagtgaaataagaaaccaactgtcggccaggtgcagtggctcatgcctgtaatcccaacactgggaggccgaggcaggcagatcacgaggtcaagagatcgagaccatcctggacaacatggtgaaaccctgtctctactaaaaatacaaaaattcgttgggcatggtggcacgcacctgtagtcccagctactcgggaggctgaggcaagagaatcacttgaacccaggaggcagaggttgcaatgagccaagatcgcactactgcacaccagcctggtgacagagcgagactccatctcaaaaaaaaaaaaaaaaaaccaacagataatgaaataactttcctaatatccggtgagtgtgcttggaatggagtaattttcatagaggcaatgtattttcaaatgcatgacctggaagctagtttagaaataactcttctcttccggccctgtttccgcatcagacagcctttcctccctcccccacttcagtgcctggtgttctgtggtcacttcagtagtaacagaccaaggtgaataacatgttaacaatacaaacatctaccatgactttatgcctaacgctctggtgtgcttctttagactggcagatatctttttttttttttttgaggcagagtctcactctgtcacccaggctggagtgcagtggcgtgatcttggctcactgcaacctctgccttgcagtttcaagcgattctccttcctcagcctcccaagtagctgggattactaaaaatacaaaaattagccaggtgtgatggcgcacgtctgtaatcacagcactttgggaggctgaggcaggtggatcacttgaagccaggagttagagaccagcctggccaacatggtgaaaccccatctttcctaaaaccaaaaaaaaaaaaaaaagccatgcgtggtggcatatgcctataatcccagaggctgaggcatgagaatcgcttgaacccgggaggcagaggttgcagtgagcgaagatcatgccactgcactccagcctggatgacagagcgagactccatctcaattaaaaaaaaaaaaacccttctaggaaacaaaacagaaggtctctatctgttgatgacccttgacttggctgtgtgctcatcagtgtcattgtctatttgtttgggtttataaaaatcatttgcttcaaaatacttgagctttgtgacatttcattgaaaaaattatggaaacctgagattgcatattttaggaaaagcagtctctcatcacttacccttcttccattgtattcttcttgcagcccaagctgttggccaaggagcttcttgaccttgtggcttctcacttcaatctgaaggaaaaggagtactttggaatagcattcacagatgaaacgtaagtactgccttgagccctcacagcccgaagggagagtcagtgcagaacccgaaactgctccactccagctgttagcagcgaaatcagctgcagaccacttgggtcccatggtctggggtcagtccaagttcatcatctgaatttcaaaggccttgtggtcatgcctggtacagccaaaggatataattagggtgatactaatattataaaattattaggtaaactagttctaataatcaagcaggtttgtgttcagactgaaatgtttatttttttttaagtggatctatgtgagtttgttttctatttaagttaaatgaaaacttctggaaatgaaacatttctctctactgttgggataacaataacaggaagtgaatttgatgataaattcaaaatgaaaataacctgtgcagtttcagtgtctaaactgaaataaagcgactatgaaaataaaaaattcagatcactgatctgatgagaagaatatttgctttcaagggtcttttcagtttggctctataaagtggtgttgtgtaatacaagtaaggaaaatctttactaaaatttccattttctttttaaggtactgttatcaaaagagtatactgaatacctgtatagatttctagataaaaatgagctattctaagaaaatagttcataattctctttcctctgtgcacacacgtacagtcacaaacacacacacagactctctctctctctctctgtcttccagatcttcagaaatacagagatgatttcctaaactactaatagatcagtgttaggttagtggccaggcaagacagtacaggggagccgaggccctgggaatcaggtggtgccactgaagcaagaacaggtgggcatccacatgggccagtgagagaggcaaccaggtgtccctgcacatggctacacttggccttggtgagatgcaagtggaaggggtggtcttatgacttattatccaaattgagacactgaacaaaagggggtgtcgttgggactgtcttgggcaaaccggaccatctggtcaccctgtaaatcagggacatttcaggctgtggtgtgttcagagagcaggcagcaggagcaaagccacatcttcctcaagaaagctgggaggagcaaggtgggcccctcgtcctggagcctgcagggaactggaatgcaggtgggagtggccgtcggtgggcaggaggaattgcaggcagggccaagtaagcccagctgggaaaggttcagggctgtgcggggaaggacccagcactgcaattttttttaaaagcttttaaacaaatgcacatgtagaacaattacttttacaaatgtagattattctctcccctttctcctgagaatcactgtaaaccacttaaattgctgttgagactattttcactaatcagaaggaaaccctaagtttcaattaatcatagccccattgttcacatttcccacgtaagtttactaaaagatcccgtgaactctagaggaggcctgattaggcttcccttttgaataaacaagaattgaaaaacgaacgtgtgatcctgggctgaaggggaagatgatgtgagtctgcagaacatttcagatcactgccctaacagcactgactggcaggaatcggacctaggtagaaagtcactcttctcccaggagggttgagagcaccaaaaccacacgtcacagcagggggtgcacacacccaagttcagcttccccatccagctaagctggtacactccatgtctgagttctcctggctctctgtgctgaccaggaaagcatgtgcgtgcatgcgtgtgtgcgtgcgtgtgtgcgtgcgtagaagccaggctggataaaagtgtcttgccccctctagtagtggagctggctatgtggaggctctgtggggggcagtgatgaagaggagtgagccatccttctggcatgatccagagaaagtgcagccatttccatcacctgccccagagtctaggtgggagggtctctccagccacagaaggagtggcggccagccagctggaggtcactagaaaaccactggagctggcaaaagatttctgaaaaagaactagcagatgtgcctggtgcaccaggggaaagggcaggtgtcaggagcccagaggaggtgaagagctggctcctgcaaggctgggcagtggtgaggccgtgactcaagggctgtcagtcctggcggtacaatgccagggccaacagacattgggagtgcctctttgttcatctgaacttttctccttttcctggtaggaaagaagaacaaaagctgcccctgcaaaatagtgcccttgggtgttcacctgctctggcttggtgattcctaggtagtaagcgctagccttacagtactacatcccctggccttgctctgtatcacgggacactacagcaaaattgttttataaccgtgttttctaattctgcatgtgtattgtgagcatgtgtgtgtctgtgctttatacaggtgctacactgtgtgttttacagtaaaatgcaatcgtagttccattctttatgacagcctgtggtgtatcacatgtatttgtctatttcctaatgcaaataaaataaggctatcacgtggaaagcacttataaactgtgaagtgccgtacaagtgcaagatactcttaccagcagcatgattgttcctgagagtagaatttctaatagtaggctgagcatggtggctcacacctgtaatcccagcactttgggaggctgaggtggacagatcacttgaggtcaggagttcgagaccagcctggccaacatggtgaaaccccgtctctactaaaaatacaaaaatcagtcaggcatggtggcatgtgcccataatcctagctgtttgggaggctgaggcagaagaatcgcttgaacccgggaggcagagtttgcagtgagccgagagtgtgccactgcactccaccctgagcaacagagtaaaacactgtctccaaaaaaaaaaaaaaagaatttctaaataatagaacgtgtgactctaggtcatatattgtcagagactctttcagaattaactgctgttgacattttgtgggatctagatgaaactggagaaaatatatataaagcagaatgtagacaggaaattggaaatttctctaagcttctctcactccataagttgtattcattaataaagcatctaagtcacagtgtaagaacttatgcccaagaatgtttaatattgttagcaatcaacagttttgcagcattaatgctaagtctgctttctttttttaatcttttaactttagttttgaaatagacttaaagaagaattgcaaacatattagagttcctttatacccttcacccaacttcaacaaatgtcaacatcttgcaaacgacgtgactttcatcaaaactaagaaatgaacattggcattatattactaactaaactacagacttgattcagatttccccaattttttacgagtgctctcttctgtacaggattcgtttgcatctggcctccttttatttttactaactctgtcctcagaaaaagagatacaggtggtcatctatataaattatctgaatcgtggtgatacatgcaaacaaagacattttggcagcctttaatacatcctgaaactaaccaagagccagttataaatccaatgttaaaataattattggccaggcgcggtggctcacacctgtaatcccagcactttgggaggccgaggtgggcggatcatgaggtcaggagatcgagaccatcctggctaacacggtgaaaccccacctctactaaaaatacaaaaaatcatccgggtatggtgtcacatgcctgtaatcccagctacttgggaggctgtggcaggagaatcacctgaacccaggaggcagagattgcagtgagccgaggtcatgccactgcactccagcctgggcaacagagcgagactccatctcaaaaaataaaaaaagtatttatattttgctagagttagggatctcaaccttagttacactttggaattacctgggacactttataaaataccaatgcctgggacctacccccagaaattccaattgaatcagcttgggtgtgacctcagcttctcagctgattctagcttgcaggcaaatttgaaaacccctgttctagacagcgggcatgttgcagtatttcctgtgctctctccctccagagcaaagaagaaaagctgattctacttcagcgttgaatgttggggtctagcaacgactcatcccaggggcctgtaaagttacagaccatctcccttctagcttccattcctaacagtaggagaacaagcttggaagttcaggtttaatgtttccaggtgtacaaatagggtaactgagattttcatttatcaaacactggcatccatcccttagagaaactcatttttacatttttttttgaaatatttctattgctgttttaagactcaaatttcatttttttcttaattgtgggctgagtgcagtggctcatgcctataatttcagcaatttgggagtccaaagtgggaggatcccttgaagccaggaggagttcaagacgagcctgggcaatagcaagacccccatctctaccacaaaacaaacaaaaaaaaattgtggctcacacctgtaataccaacactttgggaggctgaggtgggcagataacttgaggtcaggagttcgagatcaccctggcaacatggcaaaaccccgtctccactaaaaatacagaaattaaatgggtgtggtagtacatgcttgtaattccagctacttaggaggctgacacacgagcattgcttgaacccaggaggtggaggttgcagtgagccaagatcacgccacgcactccagcctgggtgacagagttagaatctgtctcaaaaaaaaaaaaattaaaaattagccaggcatggtggtgcgcagttgtagtcccaactactcaggaggctgaggcaggaggatcacttgagcccaggagttcaagactgcagtgagctattattgcaccactgcactccagccctggtgacagagtgagacctcgtctcaacaacaaaactaattaaaatcaagaagtagcttgtgagccagggggtggggtgggaatggaagatcccgttatcagaagctatagcctataactaaccaacttttaagctattcagcagaaacagtcaaacacacccaagttgaattaatgattgtcataatctatttaaattttaatttgaatctcctgtcataaattttaagaattgcttgttaaatgctgtaaataagtatcttttgtgattgattttttgggggtttttttttaagaaaaaaaaagccttttaaaagtgtttagaaatatgaggaagaaagaaaagaaacttggttagccattactccaaatttaaaagacaagtatagttagaatttattttcacataccaattaataatatgggctgggcttgagactcacacctgtaatcccaacacgttgggaggctgaggcgggagacttgcttgagcccaagtattgaaggctgcagcaagctatgattgcgccactgctctcctgcctgggcaacagagcaagaccccatctcttaaagaaaaaaaaaagaaagaaaagaaaacgagtagcttttaacctctgatttcatcacaccgcctttgagatttgaagttatattccctttccttcataaaagtttacatacaaaataaatttttgcttacattttacaacactcacagacaccctgcggccaggatgttagtttaagaacctagacagtaaacaattaaggatcttttctttcagcagactgtatcctaattaattgaattgcctgattggtgctgtctggggagtctgatttacccaaactattaaggttaaaatggcctggctgagcacggtggttcacacctgtaatcctaacactttgggaggccgaggtaggcagatcacaaggtcaagagatcaagaccatcctggccaacatggtgaaaccccatctctactaaaaatacaaaaaaaaaaaaaaaaagaattagctgggtgtggtggcagccacctgtaatcccaactagttgggaggctgaggcaggagaattgcttgaacccgggaggcgggagattgctgtgagccaagatcatgccactgaactccagcctggcgacagagcgagactccgtctcaacaaaaaaaagaaataaagaaagaaagaaagaaagaaagaaaaagtcctgactcattgaagatgcatctttagaaccactgccaggaaggctggtgcacgggagcgagcttggatctgtgctgtcctcaggtcctcgcgtttgtttcaactgtgactggcatcagctggggcctctgaaaagggttcagtcattcagcattcctggccacaagcttatctacaatttaaaaataaacaaaatagaaaagcaattttccagtggcagaagaaacaaccacaagacacagctctgggaaagcaatttatttggaaataggtttgggatttccacgtattatctgctggacagtgagagaggagaaagtcagtggctgcagcctccgtgcctggcttgtaataactgcttctgggaacgcggcattcggtgttcattaccacctctcagacgacccatgctgtgttgtcggaaacaacggcaaacatacaacagtaccttatatttagtgaccagagaagtgcttgagcatagctctttctgtgtgcagctaagataaacaaaaagaacggtgccctccaaggaaagcttagggatgcggctttctccctcctttccttcccaatgcaaatgaccggagggagctgggaacctggcacaggtgagcggagtgaattcttaatatggagactgtttgcttaggatgggagctgtgtctacacagcagtccctgaacctacaagaatatggatctgtggggcatattgtgaagctgctgtattcattctcttaacaaatatttatttagcatctgctcttaaccactggagatccagaaagcactggcccttgactccttgttgagcttgtgtttgtagattaggaagtgattcacaaaacgtggtgtagaagcgctagaaaagaaaattgggggctgggtatggtagctcatgcctgccatcccagtgctttgggaggctgaggtgggaagattgcttgaggccagaagtttgaggccaacctgggcatcacagcaaaacctctactttacaaaaaaaaaaatttgtttaattagccaggagtggtggtgtgcacctgtagtcccagctattcaggagtctgagatgggaagatcacttgagcccaggggttcaaggctgcagcgagctatgactgcaccattgcactccagcctgggcaacagaaagagactctgtctctaaaaaataaaacatttttaaaaagaaaatttggaataggcttactaaaacatagtggagacaacaatttatcctgggctggagagcccatgatttagtaatctggtttccccagtatataccctactttaaccttcctgtattattaaaggtttatagtgaaatcagtatcactggtctgtccctttttttttttttttttgagatggaatcttgttgtgtcacccaggctggggtgcagtggtgccatctcggctcactgcaaactctgtctcccaggttcaagtgattctcatgcctcagcctcctaagtagctgagattacaggcatccgccaccacacccagctaattttttgtatttttagtagagacggggtttcaccatgttagccaggctggtctcgaactcctggcttcaggtaatcagcgcaccttgacctcccaaagtgcctggtctgtccttgatgaacacacatactataagacaaggatactaaatatatcaacattcttccatttgaagagctcctctcctcccctccatccagcaacatctataagcatttcatacacttggccacgtgtggtgactaacacctgtaatcccagcactttggaaggctgaagtaggaggattgcttgaagccaggagtttgagaccagcccggacaacaaagcgagacactgtctctaccaaaaaaacaaaaacaaaaaaaacctttttttttaattacccaagtgcaatggtatgtgccagtagttccagctattccagaggctgaggcagaaggatcgcttgagcccagcagttcaaggctgcagtgagctatgattgcaccactgcactccagcctgggcaacagagtgagaccctgtctctaaatagataaacatataagaacttcatctcttgctttggatttctgtagaaactcattccatatgaaattgcctgtctacaataaaaacatctagaagctgggcagtgtcattctccccctgggtctggaaagtgacggattcagatagacttatcacacacctccacccaccagtaactataaacaaagctctccctgaggccatctctattgaaggtgccaacacttgaaccaaaaatctatttgttttatatgtagaagctaaaagcaatatcttaaatgaatgcgtccaatttctattgcctggaagcaattgcatatttattactgacctgacagtttgacctactgcaaccataaaccaaatgagcgttatcttgctcagctttaaagatagttatcagtcacataataacaaaaatactctgagtggctgctgggatgctttttttttttttttttttttgcattattattgacaaaggcaatgaagtgcattctcaaatgaaaaatcaatgagaatcatgaaaaccaagctataaggcatctcttagttaaactgtattaaggaaatgcttctttatgactttgcgtcccattccatcctaatgcaaaagaaacataaaaggtttgagggaggcacttgatgtcaggactgtaaaaggttaaataggaaagcaaaagcctttagcagtgtggaattcttgaccctgtagagtacaggaagtgtgacttagagatgagcagaaaacaacattgtaacaagtgctccagccaaaagtggtggccccagaattatggtttccagtttgctttttaatccatctttcagtttttgcccaaatagtgggcagttttcatcagggtcttggataagtcacatgtcccttcagtctgcctttataagcagccttcattgagagacttctacaagcctttaaagtggaggcagctgacctccttccttcagagaatccgaggactccaggtttgggaaagtctgcctctccattagccactggagctacgcaaggccatgcatcgtgatcccctcatgggattggagtggacgagttcaagcaggggaagtggaggaaggaaattcatttgtcctcagaggccaactattccatgtaggatcatataggtgtcattccagcttccatgttctctttgcttcctgaccattttttttttgagacagggccccactctgttgtcagtgagacagggccccactctgttgtcaggctgaagtgcagcggtgcaatctcggctcactgcaacctctgccttccaggttcaagcgattctcctgcctcagcctcccaagaagctgggactacaggcacgtgccaccacacctggctagtttttgtatttttggtagagacggggtttcagcatgttggccaggatggtctcgatctcctgacctcgtgatccacctgccatggcctcccaaagtgctgggattacaggcatgagccactgtacctggcccattttcttactttcctttctagtctatttaattgcttgataaatgttaaaccaatagatggccgggaacaaaggaattgccagtcagattcatggcttaaaaagtcattcttttagacagtttaatgtggggaataaagttttctagagggggaatccatctgtctgtttgtcctctgtggatgaagaagaattggcagtgcgtaaacccaacagactggaatccaaatgacatctgtctgtgtcccttcatgcgacatgtccccaccttgaagttcatcacatgtgaatggtgacccccagggacctaagtctaatctcttgcagtgtgtgtggtcactcatatgccagtggagtggtatgaggatatctcaagcctggaccattgactaatcttgaatattccacaaatggaatattctctctctctctctcaggtcctccttattctttgagctggtggccagagaaaaatcactgtatttttgtatcattccagtctgtgggtgattgaaagccttgtcttgtgagaataatgaaaaggttattcccatcagactgtttatcataaaatatggtaagacaaaagatgaatatttaagcctacattgtcattggatggcttgctcttgcaggcagtcattcaaatcaatgagcaaatacttcttttgagcacctaacagttgctatacactgtgctaggttttgggggataatttctgtaaatgttgaaaactgatcgttgagagataggtcatgttttttgtttgtttgttttgttttttgagatggagtctcgctctgtcacccaggctggagtgcagtagtgccatctcagctcactgcaacctctgcctcctggattcaagcaattcttctgcctcagcctcctgagtagctgggattacaggcatgtgccaccacgcctggctaatttttgtatttttttttagtagagatggggtttcaccatgttggtcaggctggtctcgaactcctgacctcgtgatccgcctgcctcagcctcccaaagtgctgggatttcaggtgtgagctacctcacccagcctaggtcatattttttaaaaataactaattgtacaagattatgccaaatgccttgaagatgacacacaccagaagccctggagaagtttgaaagaaaccccagacttaggcaatcaaggaagacttcactgaaagtaagacttgaactcagccttgcacaatggctaaacattcagataaagggatggagagacagttctccagttccaaggaggagaggcagcatgagtgaaggccaggcgcatgccatacacatggtgtactcgcaggaggctgagccccaagagaagacccacagagttgggggcattttcagaggcaggaaggaagtggttgcagcttaagataatttgtctgacaccttccagttgaccagacatgcacactttctcctcatgaggtagatctcgtggcattttccagatatagaaagtcaactggtgctgggcacagtcattcacctctgtcatcccaggactttgggaggccgaggcaggtggattgcctgagttcaggagtttgtgaccagcctgggcaacacggtgaaaccctgtctctactaaaatacaaaaaaatagctgggcatggcggcctgcgcctgtagtcccagctactcaggaggctgaggcaggagaattacttgaacccggagggcggaggttgcaatgagactagatcacaccactgcactccagcctgggcaacagagcaagactccatctaaaaaataaaaataaattttaaaaagtcagctggggaaaatgaatgcatagagagcaagttctgtagactgggaagtgcagaaatgggtgagcccctagggtgggtgctgtaagggtcggaggaggacccccccatcccacccggtgtgtggtgtgggaagactttctggagcggagacgtgagagctgagtcctgcgggatgggccggacctcactggggaagaaggaagggaaaggcctactgggacgaaggaacagcatgagctaaggaacagaagtttgaaatatcatggaacctgtggggcattatcaggcatgggcagagatgacattggcacccaggccttctgtttcctgatcttgtgttctagtcagaacagaatttatcccagctttctggaagaagttgctcctgttattttacttacaatactctcttccatttatttatttatttatgagacggagtctcactctgtcacccaggctggagtgcggtggcgccatctcggctcactgcaagctccacctcccaggttcatgccattctcctgcttcagcctcctgagtagctgggactacaggcgcctgccactatgcccggctaatttttcgtattttttagtagagacagggtttcaccgtgttagccaggatggtctccatctcctgacctcgtgatctgtctgccttggcctcccaaagtgtggggattacaggcgtacaggcgtgagccaccacgcccggcctatttatttattttttcttgagacagagtctctgtcgcctaggctagagtgcaatggcgcgatctcagctcactgcaacctccatctcccgggttcaagcgattctcctacctcagcctcccgagtagctgggattataggcacctgccaccaggtccagctaattttttgtatttttagtagagacagggtttcaccatgttggccaggctgataccaaactccagacctcaagtgatccgctcgccttcgcctcccaaagtgctgggattacaggcgtgagccactgcgcccaaccctttcattattttttttttacttttcctatattcagagcaaggtaataaaaagataaagttaatggaatttttttatccaactggagattcttagaaagaggaaaaacaggccaaagttcttcaggtggtcactattctaaggcagatccaaaagtcttccgtatagccacaggtatgggctttgtggagggggatttttttttttttttcttgtgcgaaaggtgcagtttgagtgaagcctcaaaaaggggttggaagtcacttgtgtgttttctctctttcctttgttggaggtttaagcatgtgctgagaggaacaagcgtttttagacaatgatgcagacagattttgtttctcattatccacagtcttgcacacatgccacacagcattagctacgggggaaatgcagtggggtcagttgggtctgttccatgtgactttactccataaagtgattataggactgtcttctccaggatgatgggctgacattggatacagagaggagggaaaggaaagagaggattcttcagcttggttgttccatggctttgccccactcttccaagaccagcctccgagacatggcccccagggctctccctagcctcatggctttccactcacaggacactaagacgctggggtcctccctcaccccggggcctttgcacgggctggtctttctgcctggaaagtggttcccctctgaggatctcttgcctcagccttccaaagtgctgggattaaaggcatgagccactgcccctggcggtaagtttaacgttttcagacactgtgtgtgatttgcttttcactccagcaagatgtcgtgaggattgctaacatgttttcaagtgtgctttcagtccttcaggaaaaaaggcacctgggagtgtggtggaaaggcggttcaggacaagaaggagagttctgattacattttcgtttcagtgtttccctgggaaacagcaggtctcaatcccttcactttccagttcctattcttcccctcacaccacacagtatccactgctgactcggtatcccctacctaatcccactgggttcttcaatactgaaaagctagtaataaggtgaaggtggccgggcacagtggctcacgcctgtaatcccagcactttgggaggccgaggtgggcggatcacctgaggtcaggagtttgagaccagcctgaccaacatggtgaaaccccgtctctaccaaaaatacaaaaattagccgggcatggtggctcatgcttgtagtcccagctactcaggaggctgaggcagggaatcgcttaaacccaggaggcagaggatgcagtgagccaagatcatgccactgcactccagcctgggtcacagagcaagacttagtctcaaaaaaataaaaactaaaaaaaaattaaaaataaggtgaaggttcaaatttatctacgatccagcacgttctgcttcatatataccttcaaccccaaaaaaacttctgcaaaatgcaaacccctaaccaatttgtctctattttcttcaggggacacttaaactggcttcagctagatcgaagagtattggaacatgacttccctaaaaagtcaggacccgtggttttatacttttgtgtcaggtatgtacacctggtgtctatacttttgcttctttgtgttctttatcagggaagtctgggagggcagagtgattccaaggaaagagagctcaagtttgtcttggttcattgccagggataaaggttgtagtagagctgcatgcctcatagatggaaaggcggggtgcgagggtgcagggtgtgcctgtgagtgtgcaaggatgtgtgtattatgcatttgcactaggatgcttgtgtggaatgatgagaaaaacttttttctgcacttttggggagggtcacatatctcaaacaatgagtatcttatagcacaggccgtgggattcttttctgggggcaatttgaaactacataacaaaagcctttgtattctttccttttagaggggatgccacttgaatctcgtgaaacctgggtagtttatcccaaataggagtggtcgaaacccagcagcaaaccacaggcccatctgcatttcctgccaagggaggatacagcttaataacatttcagaaacaataggcatttttctgttcagaaatctagtctaagaaattttgttttgtgcttgcaaagggaacgatttgtgggctatagtgatttaaatagttaatatttgcagctgtcttatgaagacaacaggacttaccacttccgtttgcaaaaggttgtgagaagccagaggctgggcaggtcaggggttcaggggcaaagtctgaattggtggcaaagtcagaatctgagcccccagtccagcagctccgaaacacccagtctatggaggcaccaggttctttctgtccagaaccttgattgcaacacaattacagaagcattaagtgctgatgcctcagtctttacatggacactaacacttacacccatgccatacaactctgttctttgaaatatactaacagaaattcaggagcgagatacaaatgatatgcaattctgtcattcctaaagagcatgatcaggaatgcagttccagacataggcatccttaagccacacaaggcattagaagggcttcaaacaagagttaaagggtccacttaacaggctcgagtgtatgacttttcctcagctggcagagtaaatttcaacttgcgcttaatgcgtttttgatttgtttaacagctgtgaacatatccaagctcatcttagctatttccattactgatggggatgatttcaatgccatattctctttaatggtgtatacagtttctcagatttatggcaaagcaaccatataaagcaaatagtaacaattcctctgggaggggcaggtggtatcaggcaggactccagttgcatggaagcaggtcattaacctgtcatcgcaggtggatgagtgcatttaccatatatcaggctctccccacctccctggtgatgttcaccaacattagccaagaggagaaaatcctgggcttggctgcctagtaggtgttttttccaagtgtctgaattatttgtggacgtccttgcaggagagcttggggcaccttgacgttggtggtggaagtgtcagtctctaagatacacagatctttccaaatcactgcaagcctgtcttctatgcataaaagcaggtaacctagcattgcagaggttaaataggtgctagcaatagagagaattggggaatgggatgactgaagacccagatgtaacatccacttctgatccgtagccataatagacgcttccaccatcaccattgatggtcggccaaagcaagaacctcaaagaacactccttagagagaagaatttccaaatccgcatttagggacagccattctccactatgtctttatacacgccatctggcagaatgtgctccttctccagctcctatggaagcagatctttctggaagtgtcacattccacttgtttcctgcagagccccacctgagtacttcaaactcagcaggtccaaagccaaatttattatcttctctctcctcccttgaccttccatggtcccatcaagtctgtggcatcgtcatccactcagtcacataggctacacatcttgaagtcttctgtcttcttcctggaattttttaattttttttttttttttttttttgagacggattctcgctctggcacccaggctggagtgtaatggcatgatctcggctcactgcgacctccacctcccaagttcaagagattctcctgcctcagcctcctgagcagctgggattataggcacccaccaccatacccagctaatttttgtatttttagtagagaccgtgtttcaccatgttggtcaggctggtctggaattcctgacctcaggtgatccatccgcctcggcctcccaacctagaatttttatgtgcattaattctctgctgctgcttccaaaatctccctctgtactgccctctcctccttattacctgaactcaggccctcaccagtcagtcgacctattgaagcagcctccaagggtggggtggggctcatcaccagggtcccagccacagaggatcccagcaccctcactaccctgagttcccacttcttagctggccaagaagtgcagtaacaaaacaccaatcatttgttttctctaagagaggaggcagattctctatataggtgaattccgtctctttaccttgcttttcatcctgggaagaatcctctatttataacctgacatctgcctagggatgctcacaggcagttttctccaaaggagtggtaagagaatcatcttcatcaaaagcccagaacttgaaataggcttgagtccataaaagaacttctgtccagctgggtacctttccagtgtgtttctaaacagaagcacggttgggctctgagcagcctccccactccagccatggtacctgcatatcttgacgcagcctgactcccagattcctcaaatcctttctcctttggtgtaaatgtctatatattacatctacataccacatgtctaggtagcctttgttggcaaagcagaatcgagccacctgataaaagagggccatggtaggctgggcatggtggttcatgcctgtactttgggagggcaaggtgggtggatcatctgaagttaggaggttgagaccagcccggccaacatggtgaaaccccatctctactaaaaatacaaaaattagctaggaatgatggtgcatgcctgtaatcccagctacttgggaggctgaggcaggagaatcacttgaaccagggaggcagagatcacagtgagcagagattgtgccactgcactccagcctaggcaacagagcaagaccccatctcacaaaaaaaaaaaaaaagaaacagagggtcatggaaaagataactaactacctgaaggtacattttagaaagtcagagaatggaggtactaacactgcatggctgagtaacccaggttgggctattatttgggatttatatattcttctgatataatacatatgcaaaacaccaggcagaatcatcacctccattcaacagattaggaaaatataagacccaaatatattaaataacatgaattggaactcagaacccctctccatccacgaagccagatagcatctcctctataagcatttcctctgcagaggccctgaggcaagtatcaggctgcaggaggttttggggacagtggaagggaggactcagatcctgccttcattgacccatcattcagcctaagaggggcctggtccatccagtttttcaaccagcaaatcaccaggaatgatcccaggtggcttcagggtcttaataattacccaaaaaggataaagactggagaggcgggaactatccattattcagcacctgtccattgctaaggctgattgttaatctttgcagcaaccctggaagcaggtctgattattccgaattaaaaagaaggagatgggggcccaggatggtccataaattcttccccagcatggctaataagttacgaaggcgagatgaggtctcatctgttcggtcaggtctgactccaatccttgtgtctgtcctcccctactgcatgctgtctgtctccacaggggaaaagtaacatcctcctccaatgtggcatttccaagagatcctgtgtatcccttcagtgtggcagcctgccaagacctgtggccagaggtctccactgttccctgtataggcagggccaggagcagcgaagtcaaatgcggcgaccccagccctctttgtgacccacgcttggccatgtttgcagaaccagcatcctcctgcaaagatggtgttcaggacaggtgcacaccaccatgagtgacagagccaccgccaggcctgccagcctggttccagcactacccaacccagagctcccctggcagagtgcccctgcacagggacaatcacagtcacaggtcttggcaggctgccactctgaagggatacactggatatcttggaaatgccacactggaggaggaagagccatctcaaatggtaaagcaagaattttcaggacctcagacatctgctgttggtctcacttgagaaggtcttgccattttctgcattatctgacactgtggacacccgccggaaggtattctttgaactgtgcttttctgtctcctagaaagaaaacttcagggtccacttgcacctggtcatcaccctgagctgtgtcactcccaagacttacaagcccaaatccaccatcatcccagctgtagcatgcagcagcctgctcactgctcctcctgggctgtttctgcatcatcatccatgccttcatttatgggctcacagatgtcccttggcataagcactgctctaggagccaaggacagagcagcgaacaaaactgataaaccctgttctcaggcaatttcgcgtccatttcctccagcttctgagatcctatcagccctgcctgtcctattttttggccaattcagtgcaaatccattgtgcacccttccaactacttcctgaccctggaccacacctccctttgctgctcacactttctctctctctccctttctctctctcacacacacacccacccgcagggttggactggtcctgccacacacacacacacacaccttttatttctacccccgagcttctgagtgtgttcaggaaaatgttcatgcaacttcaggttggttcatggttattgtgatgaaccccacacagatcatcatatctctagccagttctgccaggggtgcctgctcagggtctctgttccccactgtggttttacctcttgcttcaggtcccagatactcaaggcttttgctctaagaagatgttgctgcttatgtttctgcagagaaaataaaagccagcaccagggagctcctagtcctacttctttatccacaaacttaattgtatctttaattgtgtttttgtggcttctcagtccactcactgcacacacgcaaatgcatgagcgtctcagaggaagacccttagcccatcatccagcacgcactgatccacgtgtacctcaatcccagccccttctgtcacctcacagagcttctccctcgagcctttcctctctttttctctatcttctcctccatggattcctcccctttgtgaccacgtcccaatctaactgaagaaaacgtcctctgtgatgcacagcctcctccagccagtgccctctgctaccccttctgctctgctcacagcaaccgccgagagatgggtctgcacttgctgtcaccccctccccacaggcctctcgttcctcattctgtggtcgtccagcttctggtgccatcgtacccccggtcgctggaggtctctcgcccctagctccacaggcgtgcttctgccctgctcccatgtggcttctgtggctctgggctcattcgaacatgctccctttcagttcccccggctctgtggcactacactctcctgggccacctcctctttgtcccctctgtccctggctcggggcaggttccctgctctgctctgctgtccctcgagccctggtgtccacgaggtcgtgtcttgcttgtcttctctccctgcacattcccctggtgtgatttcacccccatccacagctgccactgcagtctctttgctggagactctccgtcctctgccccagtcctgacctctctcccgagctccaggccatctccactgactggcatttcctcacagatgcagctggaatctaatgatgtcgtcgtctttctgcatccaaatgtgctcccctttcgttgtcacctccttgtctttgtgatgggcaccatcacccctgcagcccccaaaaccagagacttgggagtcaaccttgacctcaccgctccctcccgcttgcctcctcctgttccctcagtcactactcgctgttattcctgcatcttaaacagctccctatccatctcttactctccatacacagcctaatagtaattagggcttccataaacctctcctggactcaagatctccttgttcatctctgcgtctggccttgaccccttccaaactcccctatatgaagacactgagcatctttctagaattctcatctgatccttgctcataatttttttccagcttcccattatcctcagaaaaggacatctttagcgtgacttgcatgatgtgacttctgcttaactgtccagcctcacctcttcccactcccctcaccacacaacacacacacacacacacacacacacacacacacattataagcagccagcagcggtcaatatatgaccaagagcaccttgaactgcaaaccattgtttagtgctataaggcttgggaacaatgtctctctgatattgttcaccaggcaagctttagaaataggtcaagaaaaaaatataaggaaaatatacacaacccaaggaagtctgcgtcatgtgtgtgtgtgtgtgtgtgtgtgtgtgtgtggtcttttcataggcacaactttgtgctcagaatgaagcctacatgtctggattattctttaattacattttcttctaccaagtgtcctgtagttctgatcatctcaactccttgtaagaaaataaacagagattagatttgcctcttcagaatttgagtttcacagacaataaactgaagcaagcagcaaaaaaataagagaggagaagtccgatcggggaggaaggattttacagccaagtccacaggccggattcttggtatcttccctggctgatggagacagcagctgctacttcctgtcactcgcaataacaatgatggcatggatctaaaatgaggttcctgctaaccagaacttgctatatttcagctaggtgtcccagttaagattttagaggcattgagattctaagcatcagagcttggctgcagaaactcacagcttattgctttcattatcatggctcttatttgccaccaagagtaggcattttaaatgtgacatttgtgttcattacaaaatgaaatcactggtccatttaattaacacttgctgtaaatattcagtgattcccaagtgcccagggctggatggggaagggaaagggagagcagggagaatggaggaggagacctggctgatgtcatctggctgggcccttgccatctgactaggcagtgttcagtctattgcaaccagaggctttcacttgtcaaaagaaggggacgggactccccgaggctttagaggctgtttaatatttaataagctcaaacacataaacacagagcacctatttcgttctccttcagactctctgataaaatattctcgggtcgggatcatctgagctagtttgggtgggctgttgcttgtggagtcaggaaacctcttagcaaggtctgcgctccatctagagtgttcctttagactcaaatagatgccctaagattcagtcctgctaagtgtgcccccaaaacccgtttaaaatgtaggtctgattatgattcagctgtggtgaggccagcagatgaggagaggacagacattgaaaagattgtcactcagttcctgggagaaggggccacaccatgccatgcagggccatgtgggaggcattggggagccgggaaacaattgggcaagagcattttttgtggtttctttggggaggaacgggcaaggctgggagagcaggcttgggattggctagtttaaataatttcagcgggctctgcagcatgggggctgccccctagttgtctggtacgtgtccctagggtggtgagggcagggaaatagtggccctgggtgtgagagccgagaggtggtgggaggggtggaccctggatccatggtgacatgtggaagtcttggggtctggaaattggctaaccctggcaccagcagtccctccaggcccagcaaggtcacagacatccaagcatcataaagccatggtcaatacacagccagactcggaactgtccatgcagaccctctgaatccgagacatagccttcatttatttccctggttacccagagacctggaatgttctttgtgaaccctggaagcactccctgctccatgctggtagttaaggaaatgcaacattgccacctactgctgaggctctcctgaaaatcagaaaaagaagccactttttttttttttctttttttttgagacagatctgcctgcctcggcctcccaaagtgctgggattacaggcatgcccggccaaaaactatgcccggccaaaaactatgcccagccaaaaactggattaaaaaaaaaaaagaagaagaggctggcctgtaacctgagtactttgggaggtcagggtaggataattacttgagctcaggagttcaagaccagcctgggcaacatagtgagaccccatctcgacagaaaataaaaaattagtcagcatggtggcttatatctgtagtcccagctatctgggaggcttagacagacaggtcacttgatcccaggaggtcgaggctgcagtgaactgtggttgcacactgcactccagcctgagtgacagagcaagaccccatctcaaaaagaaaaaaaagaaaaaaaaattttgactttgaatccaaaccctcagccctccccatcttcccaggaggctcttgtccctggtgccaccggtgtgcaccatgcctctctgggcgtgcgggtggagaggtctgagctctgtttctctgcaggcgtttttgactcagccgttccctggcagggagggaaagctcaggatgagctccataccctcccctaacagaacaatgatatgacaggcccggagctcacggggttttccaggctgtcgtcttggtgataaaagttaacaggaaactgctttccacttccgtcgagaggaggtgattttttttctcttcatctcagaatatgcgtgttatttcctgtaccttctctgccccttttatggctagacaacagagagcttggtggaaatgaaggcagtcacagagatgtagaatttgccacctcaattcagttttccatcatatgagagtggaaacgaaaagggaagcgttatattttcttaatatactattcaggagaaaattggggtggaagaggcaggatgtctttactctttactttttaagaactaaagcaaatgagattcttttaagaaacatatggcattactttgaaaattaagttatttcagaccttatatgaatttagactcaaaatcatcattagagcacaaaggccaccgtcaacttcaggaggcttctgttaatattctggtgttaggattgctttctctcttccttgcctcccctttctctccctttcctcgcttttccttcttttccttcctttagtttcttttattattctgcctaccctttgccagaggccctttgcaaaggatgtagatttatttatttatttttgagacggagtttcgcttttgttgcccaggctggagtgcaatggcatgatctcagctgactgcaacctccgcctcccaggttcaagcgattctcctgcctcagcctcccaagtagctgggattacgggtgtccgccaccacgcctggctaattttttgtatttttagtagagacaggctttcaccatgttggccaggctggtctcgaactcctgacctcagttgatccacacatcttggcctcccaaagtgctgggattacaggcatgagctacgatatagatttattttttgaaaatcaaatcattaaaaagtcaggaaacaacaggtgccggagaggatgtggagaaataggaacacttttacactgttggtgggactgtaaactagttcaaccattgtggaagacagtgtggcgattcctcaaggatctagaattagaaataccatttgacccagccatcccattactgggtatatacctgaaggattataaatcatgctgctataaagacacatgcacacgtatgtttattgtggcactattcacaacagcaaagacttggaaccaacccaaatgtccatcagtggtagactggattaagaaaatgtggcacatatacaccatggaatactatgcggccacaaaaaaggatgagttcatgtgctttgtagggacatggatgaagctggaaaccatcattctgagcaaactgtcacaaggacagaaaaccaaacaccacatgttcttactcataggtggcaattgaacactgagaacacttggacacagggtggggaacatcacatactggggcctgtcgtggggtggggggtagggcgagggatagcattaggagacatacctaatgtaaatgacgagttaacaggtgcagcacaccaacatggcatatgtatacatacgtaacaaacctgcacgttgtgcatgtgtaccctagaacttaaagtgtaataaaaaataataacaaaataaaaagaaattataaaaataaaaaaatttaaaaaagaaaatcaaatcatatcaaatttattttgctttgagatgtaaaatttgctactgcaattttgctctccattcttaaagaactaaaagttgtttaactttactgtgcctctgagaccatggtgggccctatatgaagaccttggtgatataagacacctgctccagaagcagggggcaggtgcttggcaggggcaggggttatgggcagagatcagccagtccattaattttcaggctttacaagtatgaggaccactgcgtaattcctccaaattttgtagaacctgagatgataagaattgtactaatgatatctgtggattgagaaaatttaatgtctgaagttactccaaattcactcaccaatttcaaaaaaacttgaattgtattcatcacagcagcctctgcacacatttgaaaaatgatagaaagctttatttatttatttagtgtgtagacaagaggttgcaagctggtgggccatgggcttgatgtagcctacagacgtgggtttttatcttcatgtttatgcaacagtagcattattatccttcaggtatggtaaaagatactttttttttttttttttttgagatagagtctccctctgttgttcaggctggagtgcagtggcaccatctcggctcgctgcaacctccccctcctgggttcaagcgattcttctgcctcagcctcccaagtagctgggactacaggcacccacacccacccctggctaatttttgtatttttagtagagacaggggtttcaccatggtggccaggctggtttcgaactcctgacctcaggtgattccccccacctcagcctcccaaagtgctgggatgacaggtgtgagccaccgcgcctggccaattatggataaatccttttatcttttaccatacctgaaggataacgctaccattgagctttcctttctaaaaagacacatgaggtcctgtatctccagtgtaggaactctcctcctcttccatttcccagtggaatctaaaagtatcatttgaagctggacattccaagttgttgcccctcaggtgattgtattgattagaagaattcatttttaaattaattactataaatgaatagaacttcttgaagctaagggcatcagtttgttcaccttatacgatgttggtctcttgtttttgctgctgctgttgttgtttacattgtagtcagtttccaatatttaaaaaccagtggacttcttaggtagagaaccacttcttcttttacggtctgaagaacagaagcccagcaggatgatgtgactgccctgagtcacacagagctggggactccatcactgctctctgactccctccagaggattctggccctcagattataacactattctagaaaactgtagtacttgtttcttctcatttcaccttcctcaccttctgcctcttcttggtgaacccagtttccaagagccccaggtacccagcaccctcctagtccaccctaagggttgctacacctgctcagaaccttcttccctccaagatgttgcatttcaacctttcccctctcttcctttcaactcctagtccttcagtgcggctggtcattagacagtacaagcgcattatctcattaaagaatttaataaactccaaagtcaatattataaaggcacatttagtgtaaacttaaataatggcagcatgtttcatcttgaaaatatctataagctccatctagatgaaatccgattctcatttggcttaatatgcattcatatcacagtgttaagagcacttagcatagctctccgaatgtgcagaaatcaaatcacacttcaccaccttcgggagtagtagtaaccatttcaaagaaagctgtgattaagaagaaattatcttttaaaaatccaacttggctgggcacagtggctcacatctattaccccagcatttcgggaggctgaggtgggcagataatttgagcccagcctgagcaacaaaggaagactccgtatctacaaaaaaaaaaaaaaattaggcgtggtggtatgcaactgtagtctcagctgctcaggaagctgaggcgggaaggttgcttgagcctgggaggtcaaggctgcagtaagccatgcaccactgcactccagcctggacaacagagcgagaccctgtctaaaaaaagaaaaaaaaggagaagaaaagaaaatccaactcaatgacaatttaggacaaacaagcaatgtgatgaaaacaaataacattatgtaaaattataaagcagataggacaaagaaatcagaggcctagttttagaatttgttcttacaaattggtggtagacccagttctttggttatggtgaggcccattaggcgtgaccctaagccactatcaaaactccaaaaacagtttgtcctccctagggaatcatagaaaaaccatggatggtgcctttttcctttgtttatttaggatggggaatgccagctttcatctcaaatcatgtagctcaagagagcactttattttctgcacctgctgtttctgtggttcacgcaccatttttctctttcaggttctatatagaaagcatttcatacctgaaggataatgctaccattgagcttttctttctgaacgcgaagtcctgcatctacaaggtaggaactccctctccctcaatttccctctgaaacctgaaagtatcatttgaagctggaaattccaaagtgttaccccttaggccattttattgattaggagaagtcatttataaattaattactataaataaatggaatgttatgaagctaacggcaccatttaataatgtgattcctgacccggcgcgctggctcacgcctgtaatcccaacactttgggaggccgaggcgggtggatcacgtggtcaagagattgagattatcctggccaacgtggtgaaaccctgtctctactaaaaatataaaaattagctaggcatggtggcacatgcctgtagtcccagctacttgggagggtgaggcaggagaattgcttgaacctgggaggtggaggttgcagtgagctaagatcacgccactgcactccagcctggtgacaggcggagactccatctcaaaaaaaaaaaaaaggaataataataataataataataatgtgattcctttgatccatggctgtgtttctggctctgtggacatgtttcctaaccttattttaaaggtctcctgattttaaagatttctttgtcaactgagacaaaggtgaaaagcctagacaagtatgacaaatgcaccagtcaacttagacaggtcttgcagataggaatgagcttcttataaccaaatacgtgtatatttgaccatttttagttggtctagcagcatctttcaaagggacgctattgtcactttgagacagtttcttttttaaaaaaaattgtaaaatgcacatacatttactatcttaaccattttggaaaatatttttatatttccataggtttttggggaacaggtggtatttagttacatgagtaagttctttagtggtgatttgtgagaatttggtgcacccttcactcgagcagcatacacggaagtcagtttgtagtctccgccatttttaagtgtgcagttcagcggcattcagtacactcacaatgttgtataaccatccccaccgtcattcacccaagagctcttttcatctgctaaactgaaactctgtactcattaaacaacttccccttccccgttttcctcagccactggcaaccactactttttgtctccatgaatttaaccactctagtacttcatataagtggaatcatatatatttgtccttttgtgtctggcttactttacctagcataatggcctcaaggttcatccatgttggctgtgtgtggtggctcatgcctgtaatcccagcactttgggaggccgaggcaggcggatcacctgaggtcaggagtttgagactagcctggccaacatggcggaaccccatctctattaaaaatacaaaaattagccagatgtggtgttttgtgtctgtgattctaggtatttgggaggctgaggcaggaaaatctcttgaacctgggaggtggaggttacagtgagccgagatcataccactgcactccagcctgggcaacagagcaaaactctgtctcagaaaaaaaaaaaaaaaaaaaaaaaaaggttcatccatgttgtagcgtgtatcagaatttccttcctttttttttttttttttttttttaatttttaagacagggtctctctcgcccaggctggagttcagtggtgcaatcttggctcactgcaacctccaccttctgggttcaagtgatcctcctacttcaccctcctaagtagctgggactacaggtgtgtgccacctcacccagctaatttttgtatttgtttatggagacagggtttcaccatgttggccaggctggtctcaaactcctgggctcaggtgatctgcctgccttggccttccaaagtgctgggattacagaagtgggccaccacgcttggctgccttcctttttaaggctaaataacattttattgtctgtgtagatcaccttttgttgatccattcatacatcaaaaggcacgggttatttccaaaaccttttgcctatcatgaataatgctgttatgaacatggatgtctaaatatctcctcgagaccctattcccagttgttcagggtatatacctataggtggtattgccagatcatagggtacttctatttttcattttttgaggagccatccctactgttttccatagcagctgcaccattttacatttctaccaacagtgcccaagggttccagtttctccacatcctctccaacatttgttattttctattttgctttattaaattgatgaccatcccaatgggtgtgaggtgtatctcattgtggttttgatttgcgtttccctgtagactagtgatgttgagcatatgtccacatgctgttggccatttgtgtatcttctttacaaaaatgtttgttcaagagatgattcctaattgagagcgacagccccttgtcctgtatccaattgctccataagcttgtagtgcctccttttgtgggatgacccaaaatgcctacacccctttacagcacacacctcctcccggggaagatggacttgcggaatatcactgaggttaggaactgcgactaaaagaacatttttttttttttgagacacagtctcactctgttgcccaggctggagtacaatggcacaatctcagctcactgcagcctccgcctcccaggttcaagcgattctcccgcctcagcctcccgagtaactgggattacaggtgtgcaccaccacgcttggctagtttttgtatttttaatagagatggggttttgccatgttgcccaggctggtctcaaactcctgacctcaagttgatccatccaccttggcctcccaaagtgttgggattacaggtgtgagccaccttgcccggccctaaaagaacattttaaaaaagaaacacccactccactggctacccccggcatgcacataacgaatgcaatgaatgtctcatgaatgcaatctccgtcacacccccttagggctgctcattaacagtaatagacaagaacggttcattcctacaaagttcacatgatgtgtaggcttgttgctgagtgctttatgtgaattgtttaactgagtcttcacaacgccttttgagatagacactgctttttttttttttgagagtgaattttgcataagtttattgatggtaattaatttggaggccaaaatgcattctaccttgaaataaatcaaataatactaaacctaggatttccccttactctaaaaatgtaattaacaagaagcggaagagtttgaggtatacaccagctgactaatgtagggccacagaaagcaaattaacagatgtttttctgaattcacagcttaagttctacctcttacctgggtaaaatgtcagggactcgtctgaagtcctgaagtgtgaggattagttagaataaaagttctactaaggaatttaagggtagtgcattcagtcagggcaaattccagatggacaaaccagagaactttcaagtgaagatttgatgggtttagccattcctgtgatctcagtaaggaattttctcttggttgtcagaacattgatggaagattaaataagtcttttttttttttttcttggagatggagtctcactctgtagcccaggctgtagtgtaatggcataatctcggctcactgcaacctctgcctcctgggttcaagcgattctctgcctcggcctcctgagcaggtggaattacaggcaccagccaccacacctggctaatttttgtatttttagtagagatggggtttcaccgtgttagtcaggccggtctcgaacgcctgacctcatgatccacccaccttggcctcccaaagggctgagattacaggcgtgagccaccgcacccagccaattctttttttaaataaataaataaatgtaaagcccagagtgtcctgaattttctaaaaagtgttttattattattatactttaagttctgggatacacatgcagaatgtgcaggtttgttacataggtatacatgtgccatgatggtttgctgcacccatcaacccaagagatagatgcggccttttatccctgttttcccagtgaatgaagatgagatcacatgcctaatgaatggccaggctatggtgtaccctggagggaggctctcctcgtgcgcttgtctgtgaggtgttcgatggatggattcaaaggagtctagggagataccgctgcctggattttaaaatgtaattaaactcaggccctagggattgcaaaaacccattaaaccttaacacacacacacacacacacacacacacacacacacgttggaatggtagtatcagccatcactttccttctgtaactacctcaacacattcactgcacagaatagttccaccaattacaaatgttcagaataacggagggcctggtaatgatcaaattcagttctgtgaaaagacctcattttgggacagttgctgagccaggacttaaactgggctcaaacccagcacactaagaggacagcattttggggttttgccgaatggagggaaaagataccataatgcagttccaggtacttttagattctttcctctaagaccccactttctcattataaagtggaaataataatactgaacttacatacagattgtaagagtatcaggttttttttttaaataaatgtgaaagcgctttgaaaccaagttcagaaatgaaaggtgagcagtctccaccaggtggcagccttgggcagcgaagtaaatgcatggcaaggctgaatccgcgaaatcactctccagcagggcaagtaaaaaattgtccccggcccacgcctgtaatcccagcactttgggaggcagaggcgggtggatcaagaggtcaggagttcgagaccagcctgaccaacatggtgagatgccatctctactaaaaatacaaaagttagccgggcgtggtggcaggcgcctgtaatcccagctactcgggaggctcactcaggagaattgcttgagcgaacccgggaggctgaggttgcagtaagccgagatcgcaccattgcactccagcctgggtgccagagcgagactccgtctcaaaaaaaaaaaaaaaaaaaaaaaaattgacccaaagcctacttgggcagacgcttggggaaagggagaggagttgcgttcagtactgtcttgtcccaaatgctgagctggcactgaaggcctctgaacatcatgcacgcctaggactttgcgattcagggaaaattaaaaagaataaatgtcagaactaaatactacagatgccctgagtggaggtgatgacacctttgcagccagccacatttaggatcaaggtcccgacagcatcagcccacatgctgaatgtcaccccagaacccagccctctcttctcaaaatctttccttgggcttgggcacataaatgaccacaaatgaccaagggacagcatctttcaagttgatataggagaccaagtcgcatcccaaggccccctgtctccctcccgtgatcaagaataatattttcatttgtacaaattgccatttaaatttatttttaaattttttatatatactatgatatttgagcctcagcatctctgcgtgagatggagcgagaatcgctggctttgcagaggaggaagtaggtacagagaggctaagtgactcagagacaaaggactgggggatggctggatagcctgtgtaacctgtgtcagtgtaaagatcatgaaaggcactgctgagtgattgacagttcagcttttgctgccgggcagacccaggttcttttcccaggcatgccccttggtaaaagggataaatgtgggcacctcctgtaacgtctccaagcttccctttcctctctaattgagcaaggatgttataaggctctaaccacaaccttcttgggaagattcagtgagataaagcatgcaaagttcttagtcccatgccaggcatgtgattagctcgttggatttagacccgagtttttttctcttggctgtgattctctttgtgccacccacacagccccctggtgctttggggaccttgaagagcccagagggtagtgttagacccagataacccatcccgatgctgatacccggatgcctgggtttacccagcgtaggtttagtatctgctccctccctgtctcttggggaacggttcctactgtatgttaaaatctaagttgtcaaggtaaaataagccgcttatttctgctttttcaaagttcaatttcattcactttttaaagtattaatatttgtttctatcaaagtaatagatgacatcatttaaaagtcaaatggttccacaaggctgattatgacaaacagcttcctccctgcaactcctgccacttgcaacagttttagctgtttcttctagtatttgcctccatatagataaataattgacacagggcattattccttgattgattcacttttaggttgttgaattcctgttaaaaatggatgaagacggccaggcacagtggttcacacctataataccagcactttgggaggctgaggtgggaggatcacttgatcttaggagcttgagaccagcctgggcaacatagtgagatcccatctctacaaaaaacacaaaaattagtcgggtgtggtggcacatgcctgcagtcccagcttctctggaggctgaggtgggaggattgcctgagccccaaaggcggaggttgcagtgagtccaagagtccagatcacactactgcactccagcccggtggacagagcgagactttgtcacaaagaaaaaaaaaataaggatgtagatttagattataaccacccacattttatttccttttccattttcttagtatggtgatagcataattctggcttaaagccgtagtcataagcatgacattatcgtgactaatccaagtagtatcctgtggttgcagctcgttttttagacaacccattgttttacccaaagggaatacttgccttgctttcacttatttagttactacatacccttcacttttctcccaaaagttcctacagattctcagatgtctaccaatattaatttccagctacgtcgggtagttctcgttcctctttggtttgattttggttgctgtggcagctgctactgctgttgtttttccaggacctccctcttagactcctccaacctcctgctccagcctggacttggtctcatgcagagtctcaacccgggatgccgcatccccatcagggtctttccttctccctcgttctgtattgggtcctctctttcccggatccggagtcttcctgttttttgttttacaccattgtttcgctggagaacatcctgcaatcaatccagagaaagcgcatatgggaagtaaaatgtttggatactggcatatctgaaaaagtctttattctagctttgtatctaatgaatagtttgactggatatagaaatatacaaaaaaaaaatttctctcagaataccaaaggcgttgctccggaaaagcccaccatcctatccattgtatgtgacacccccttgggctccccaacaatgggatcctttgggaactcctttttgctccttctgatctaaaatttcaggatgggtgccctgatgtgggtctttgtaaatccattgtactctgtgttcgatgggcacttttagtctggagacgtgacatgcattcttttttagttgtgaggttctttttggattgtttctttgacatcttctcccctcttgcctgtgtcctctctttccagaattcctatttatcaaatgctgggcatggcctcccactcctatacttgtctctccagctgtctatctctgtctttttattctactttctgggaggctttgtcagtatttactttaatctcttctctggactttctaacctttgccattatggttttgttttttgttgtttttttttttcttaaatttctaagagtttctttatattatctgattttttaatattatgctattattgtttcaggaacataatatcctctcttatcactctgataatattagttatcattattattctatgtttccttccagctctttttttccagtttatttgtgttggtctctctttcctgtacgaggcttcctcagttgtctgctggccctggtctgttgcttcacacttagaaactaagcagatgctccatttcagggtgggatggtcccccagtgggtgtccctgtgacgtgatcccgtcgcaagctggttctttccctggggaaccccgaatatcagtgtcttggtatctggacatctttcctctctggctctccattctctccagaaaaaacccttcccttcctgcctgggacatgtcctcccacatccagggatcgggagggaacagtctccacactgggtatagaattccatgtaattcctgcacttccggtccacttcatccctgcttcctgttcttcttcagagaacgaacctctcatctctttaatagcagaaaggcgaggaaaggtgtttggctttgttttgctatttttcccaaactgtgaacactgccttcctaccttcctctctctttcccagcaggcaggaggcatggccacagcagacgcccctctcactttctcttcccttccacccccctactttatacaatagagcaggaaaatgtagtcataatctatccaagttgcagaaaattaaaatatggatatgagacagcggggctgtcattgtgtgcttccggtggagcaggaggaagtgtggaataggattcctacatggtccaacagtgtttctgatgtgcttgaactcactaaggagacaggtgggtgatagagaggacattggccagggcgtggatacatctcatttagaaatgtgagtcccgtcccatgggaaactctcacaggaagcctgcctggaacgttgcgtgttccctggaaagagaccaataagacggcacagctttcccgccaagccttttccatctgctcctctccctcttccggtgtggcttccaacagccaactgaaggtgcccatccatcagcccctgcaggaggcagcggacttgtcccatgagacaggagcgagtcagggaatgtggaccctcagctcttcccgcactttctggctgcaggattgaatcctgcctattctgggttctgcactgacagaagaagatgatccaccatcaaaaattagtcatcacagtgatgtctgaaagctttgcaaacataggtcgtaaaatgacagagtctgtttagtttttttatcagaaagatttccacaaattatacatcttacagctataagagaaatcaagaaatcaccagctcccaatcttctttacatgcaaaccttcagagagaaaagaaaattggtgctcatgtcgaaagacctttccattcagttcctcagagaagtactttgatagttccttgattgaggttaggtggcgtgagtggctgtcagaatgcctagatgcaccatcagtatcatccaaaaggccaccgaggtggctaactaggagaaagggctgtattggcagtaccggtttgcaagctgagaagagaaagtctccagcgtggactgaaggtgctctttttgaaaaggagaagggcaggtcgggttttatgactcacggtgttcttattacataatagagtcatacacattcagcaggtttggggaaaagttatgcatagttacgaaggagtgtcgagtgtgtgtgccataggtagacatattggtgacatacttaccatgtttactttggttttttaaatttttaattgttgtgggtacatagtaggtgtctatatttatggggtacatgagatattttgatacaggcatgtaatgtgtaataaccacatcagggcaaatggggtatccaccccctcaagcatttatcctttgtgttacaaacaatccacttctactcttttacttacattaaaatgtacaattcaatcattattgaccacagttaccctgttgtgctatcaaatactaggtcttattcattctttctatttttgtgtacccattaacgatccccacctctcccaccctcactaccctttccaacctctggtaaccatccttctattctgtctccatgagttcaatggttttcatttttagctcccacaaataagtgagaaaatatgaactttgtctttctgtgcctggcctatttcactttacatcatgacctcccattccttcctgggatggcttttagcattaaaatgaggtggaatttgaggcgctttacctcaccaggtgaactataggacacaaagatggtttgtgtgcagcctctgcgaactgctgaaactggcctaaagtctacagtagctcctcagaagagaatgtttgtaaggctggccctctgtccagtcagagttgtaatggtctgggttgtaaaccagcattgacagctcctattggtagagagtttagccacagaaattgagaaatttgctaggccagctggccctgaaccctcgacctgtaggtaacttaaccttagagtctggtgtagttgataaaggggcatctattctggtctctaagattacatcaggaatctaatatttcacctgtataagtttgcccttgcccaaagggattagctatgaactctttatttatttattatataataataataaataaatatttattatataataattatatataatataatatattatatattatatatctttattatatattatataatatatatatttttttgaggcggagtcttgctcagtcacccaggctggagtgcggtgacgtgatctcagctcactgcaacctctgcctcctgggttcatgcaattctcttgcctcagcctcccaagtagctgggactactatgggcatgcgacaccacacccagctaatttgttttttttgtgtgttttgttttgttttgtttggttttgtttcaaagtgaaacagggtttcaccatgttgcccaggctggtcttgaactccagggctccagtgatcctccttccttggcctcctaaagtgctgagattacaggcgtgagccaccgcacccagctggcaatgcactctttagggacattcatcacatttcaattatgcttcgtctaaaagcactaaccttccccagcagtgataaccaaagaaacaggactgtgcttgccatctggagatgggctgaaatatgcttctttaggctggaggagaagttggtaccagcatttttctgagtggatttttaagctcatcttccatggcctatcactgtactaggcacatagccgatgctcagaaaattattttttaattggttactttccaagggagcaaggatttgcatatttcctgagaaatcaccgagttttgttgcctacactgcactgagaacaaatcatgacataaaggaaaaggcttaaaatttctgctttatgggtgttcttgggagggtgcagatcttgtccaaattggtctgggagcctctgctggccaggcgtggtggctcatacctataatcccagcactttgggaggccaaggcagttggcttgaggccaggagtttgagatcagcctgggcaacatagcaagaccccaaccctacaaaaaaatatatttaattagccaggcatggtggcacacatttgtagtcccaactacttgggaagctgagatgggaggatcacttgagcccacaagttcgaggctgaagtgagctaggatgacactggggcattccagcctggatgacagagaactcatctcttaaaaaaaaatggagtttaagtaatcatccttgggccacatttgcagtttaggtctaaatgctatcactcttgttgatattgaaataaatggtctttattcaataccttcaacatgctttgctaatgatcagatgacgtcatctcatctgtaggtgggagaaccaagccaaagcccagaatcacattctagaggacaacataaatatctgcaggtttagagcatgcccttgtaggacagagggggtatgagagaaggacagacaggtaccttctttttcaactttcaagaaacaagcttacatggatctgtcgtcttggctgtgcccatgatctctaaaagaatgattccaggccaggaatcagtagctcacagctgtaatcccaacactttgggaggccaaggcaggaggattacttgagcccaggagttcaagaccaacctgagaaacatagtgagacccccatctctacaaaaaaactaaaattagctaagcacggtggtgtgtgcctgtggtcccagctacccaggaggctgaggcaggaggatcacttgagctcaggagttcaaggctgcagtgaactatgatggtgccactgcactccatcctgggcaacagagcaagaccctgtctcaacaaaaataaataaataaaagtaaaaattatttaaaatataagttaataaaagaacgattccttgagatcctgacatgggctgtctgcggtggggtggacagcatgagaaatcccaacgcggcagagttagggttgcggctgagcatgagtggcattcacctcgtggatcattagacaaacatgaagtgacttgatgctgaaaaactggcagaggactaagaatgaggaattgtgcgagatcgcatcagtctcatcctgcaccacagcccctgtttgccccgggggcaaatttgcgtaattatgatgagttgtgcaatgaggcatagagccacaagaagagagcaagttgggctaaatatgggcattgtgtcccactttaatgatatacggtgtattagtcagagggacagaaccgataggatatatatagatatacagaaagagacttcttatgaggagttggctcacaagatcatgggggctgagagatcccacagtctgctgtctgcaagctggagacccaggaaagccagtggtgtcagtccactggctgagtccaaagacctgagaaccagggagccagtggtataagtcccagtccaaggacaagagaagatgaaatgtgatgtcccagctcaaaaagcaagggacaaaaagaaagaaagaaaaatgaaaaaaggggcaagctcctccaccctccatcttttgttctattcaagccttccaggattgtgtgatgtccacccacactggggagggtggtctattgagtccactgattcaaatgctgatctcatccagaaacaccctcgtagacacatccagaaactgtttaatctgggcaactcggggccggacacagtggctcatgcctgtaatcccagcactttgggaggccgaggtgggtggatcacttgagcccaggagttctagaccacccggggcaacatggtgaaacctcgtctctattaaaaatacaaaaagctagctggttgtggtgatgggcacctgtaatcccagctactcaggaaactgaggcacaagaatcgctcgaacccaggaggcagaggttgcagtcagccgagatggtgtcactgcactccagcctgggtgacagagcaagaccctgtctcaaaaataaataatctgggtaacccttggcctgtcaagttgacacataaaatacaccacagacacggtgaccagtacacacacatacgccacacacacacacacacacacacacacaacccatctcttttaaaacaaaatcttccatctctactaaaaaatgcaaaaaattagccaggcgtggtggtgggtgcctgtcgtcccagctacttgggaggctgaggcaggagaatggcctgaacccaggaggcagagcttgcagtgagccgaaatcgcgccactacactccagcctgggcgacaaggcaagactcccgtctcaaaaaaaaaaaaaaaaaaaatctagtaaagtttcctataaatgctaagacatactaaagaacaaaggcaaaactgtggagttcagattatctatagatactcatcagcagaaataaataatatagatctaatacttgtagtgtgttttatatttccaagtcacttcatttatgcctcaccaaacccagtaaaataattggaaaggaaattgttatccccattttactgataaggaaaatcaaactcaaggtcaggtggttcagtccatgtcctcaaggcattggggggttaagaccagaatatgggactttcaggggacagtagaaataatcttaaggagaatggcatgccactattatctttagatgttttgtgggtaagaataaacgtggtgataactggtgagaattcgttaggaaaacgcttggtggctttcctaaccctacaagtggttccgagtggactttgcaaagactgtccttgtcaaaatcttctcgacctactatatggttgtcaattacattttctcacggaattatctcatttgtcttacatgagagttggaattcctgcagttccggaccatggtgggctgcttgtcattaagattcttggttaaatgtaaagaccaccaccaagtccctctgagcaaagaggccctccggctctcaggactcttggagaacatccgtaacacctgccatttggggttcccacgggcccacttgttagaaacacttggagaccctcagatggaaatctttctgagaatattgttaggcatggtgttgctgataaatgacctcaggcctcttccttcggcagttcagtcacctgggataaaacaacacggcgtgggaggaagtggggcagcccttcccacccctactcagagcacgttcgcacacacacacacacacacacatacctgcagacggtcacggtttgtctttccataccatttctcaaagatcaaaggaagcagcatgcattattcagtagtaaggaaagcagatgcctaaagtacacacccagtggccacagtcaccaaaggaccttacacttcctcctgccagcatcgccctgggcttctctagagtctcaaagtaattattccatgcccaccagacagcccaagattcccaggctagattccagctcagacactgcagaaacccctccctccaatggccgcaagagcacggggggcttcaccgcagagctgtggattgcataagcgcagaggaatgttacacctcagcccctgcataaggcagatggaagccaccctcaagcctccgggaagtgtcttctgctcctcctcctatgatcccattttgtccttagttacagttatggggaaagcccagaatcccaggaaaaaaatgggatttttgcacactctgtgtggtctccttcagtgtagttcctctgcttgagcagaaacccatgaaagatgccacctctggccgggcacggaggctcatgcctgtaatcccagcactttgggaagccgaggtgggtggatcacttgaggtcagtagtttgagaccagcctggccaacatggtgaaaccctgcttccactaaaaataaaaaaattggccaggcatggtgacgcacacctgtaatcctagctatttgggaggttgtggcacaagaattgctggaacccagaaggcggaggttgctgtgagcccaggttgcaccactgcattccagcctgggtgacacagtgagatcctgtctcaaaaaaaataaatgaaaagccacctctggaccactggagaagtcagataaggaaaagggagagtcattttcttaatgtcatatgggagcacatttctgctaggaagacccctgaaaacatctaataactcccctgtgtggaacttggctttcaggggtgttttgtttcgtttcgttttgtcttttgagatggagtctcactctgtcaccaggctggagtgcagtggcgctatctcggctcactgcaacctccatctccagggttcaagcgattctcctgcctcagcctcctgagtagctgggactacaggcgtgcaccaccacgcccaactaatttttgtgtttttagtagagacggggtttcaccatgttgtccaggatggtatcaatctcttgacctcatgatctgccctcctcggtctcccaaagtgctgggattacaagcttaaaccactgtgcccggccagctttcaggttttgaagtaccatgggaaattttcagagtaagccggaagtctagagctctgctccatcgtggtagaatcttaaggataaagccacctggaaggatgaggtgtataagggggaaacagtatcatgaacaagtgacattggggaattgggcaaagactctcaggatgtcttcccaccaccctagattggttcttatccacaccgttttggtctttgtgttgagtcctatgagaacatccaatgaaatgatccttaaattcaatgcatgttaaataggcgaggtcagaaataataatgcagctctttccatcagattttgtaagcatgtgcaatgcctggggcgcttgaatctttaatcattttccctcccactggccacatttcacctcctcctgtttttgatatcttcactgggagatagatagtcaaggtcaggcttttcacccgaaaagtcaccacagttaaaggtgccagttctcacttaacccgagaacaactatggtgagagagaagttgaatcaatcaggttagatatttgatggtgctttcctgtggatatttttggtagctttcctgtggatatcagttatgttacagttaatgttcaccaatgatactctcctgggaccacataatgggctgtgtaaaatagaataaaagaccttccttcgtgttacccgcctccgcgcaggtagagacatcttcgtttagcggatgaatcaaatagcaaactaaaagctatgttcacacttaaaagtgttattttctgatggttggttttgagttgcgcatcagataagcctctcagcagatgttaaatattagcccgcagtcgaccattggctgtaacataaggtgtaaatgtttgacagaaaagcacacatacaacagcacgctaacaagtgcaccccaaggcattcaggtgggaatggaaacgcacagagtgagagtagaaaccatctattgtggaaatcctggacagtgtttctgtgaagccatctgtacactgttaaatgatttacattctgatgggacctgctaatcccggaactgcaattccaaacattcttccgcatcccagcaccgacagcctctatcaattccaaccgccgtaaagctctttcagctggttaaacgtaaggaattattgtccccaattcttccgtaggctctcatgagttcttttaacccgtacttctaaggtggttccagggcaaatattagtatccaactgtgaaattcccaggcccaaaggagcctgaaagatatctctccttcaaaagatccaggtgtgcttgaatgcattgttttaaattgcaggagccaattctggacctctcaaaaaataattacaaaatccatgaatcggccgggcatggtggctcatgcctgtaattccagtactttgggaggccgaggtgggtggatcacctgaggtcagaagttcgagaccagcctggccaacatggtgaaatcccatctctactaaaaatgcaaaaaaattagccaggcgtggtggtgggcgcctgtaatctcagctacttgggaggctgaggcaggagaattgctggaacccgggagacagaagttgcagtgagccgagatcgcaccattgcactccagcctggacgacaacagtgagactccgtctcaaaaaaaaaaaaaaaaacaaaaaaaaaaatcaatccttgaatcagagtctggcttgtaatgcaagtgaatagaaactcttgctaagcaaattggattatagatattgttcttagaatacattggctgaaactgattctctattgatttgggtggaaatgtaagtcctaagggaggtcacacactggacaagtagtagggggtctgttcccggccccttaagtgccattaaggccctgtggttttgcaaagtcccttgatgtttttgggttccattctcagtaaaagcacagggtcaggctggctggtctctaaatctcttttacctctagctctctgtcatccagtcagccactatgggatcttgtgatactagggaaagaaaaataaaatggatatttgtgcttaagcttgacaccagacataggatatcaattaaattgtgtattattctggcatgctgatggactccaggcttctctttgtctttaacatgtgagctatgtataatgagagagtgttgtgcacttagaagacttagaagtttattaagaaggtaggtcatgtcctcatggttagtgagtttgttgttgttaggttttgtttgtttgtttgtttgtttgtttatttgaggcagggtctctctgtcaccaggctggagtgtagtggcatgattacagctcactgtagcctcaacctccgcaggctcaggggaccctcccacctcagcctcccaagtagctgggactacaggcatacaccaccactccaggctaatttttgtatttttaatagagatggggtttcgccacgttgaccaggctggtcttgaactcctgggctcaagtgatccatccgcctctgcctcccaaagtgtgtgagccatcatgcccagctaggtgtttttaccatacacacacacacacacacacacacacacacacacacacggaaatctttggatgtgatcgatatgtttattaccttggttgtggtaatggtatcatgggtgtatgcatctgtccaaactcatcaaattgtttacattaaacatatgcagtttttgaggtgttttagttatacttcaataaagctgttttggccgggtgcagtggctcatgcctgtaatcatcccaacactttgggaggccaaggcaggcaggtcacctgaggctaggagttccagaccagcctggccaacctggtaccccgtctgtactaaatacaaaaaaattatccggtgtggtggtgtatgcctgtagtcccagctactcgggaggctgagacaggaaaatcacttgtacctgggaggaggaggttgcagtgagccaagatcgcaccactgcactccagcttgggtgacacagcaagactctgtctcagagaaagaaaaaagctgttaaaagatatgaactatatacattttgaaatatgtatttcaaaaatataaatataaagagagagagagaaaaggaattttttcaaaaaccaaggagaggtttaagtgctttgaagaccacgtccctagatcacaattaagtatttgggggaagaactaataggcagaaacattgttaaacttacactgtgtaacagttgctgaccaatagaactttctacagtggtagaaacgttctgtatctgagctgacgatacggtagtcactagcgacactgaactattgagcacatgaaagaaatgtggctagtacaaccgaggaactatatttttacattttatttaattttaaggagttacaatcccactgtaacattcctttcaaaaaacagcctttcaagaaagcctttctttatagaaagaaagttctgaagtttagtttttaaagaaaatgcattttgttgtcaagcatccctattccagtgattaataacattaacaaacaggtttgtaaaatgctggggcctagtctgcctcttaatttctctaaagatttaaaggtgaggcccttgagatagtcgggtaggcccaggtcccctagtccatcccagctaagagcagtaaaaacgatgttgggagtgtttaggactgaataattcagggtgtggtctcagagactcaagatgttctatgaatattggggattctgagcaattcctcagaaaataaggctttttgtttgtttgtttgtttgttttgagccagggtctcactcaccccattacccaggctggagtgcggtggtactatcacagctcgctacaacctcaacctcccacctcagcctccaaaacagctgcgtctacagacgtgcaccaccctgcccagctaatttttaaattttctgtagaggcagcatctcattatgttgcccaggctggtctcaaactccagggctcaagtaatcctcccgaagaagagctgtcatttaaaataaaagaaaaaaatggtggttaaataccaaacttgtcttcgtttgttgctttttcctttcaggagcttattgacgttgacagcgaagtggtgtttgaattagcttcctatattttacaggtaagttgtttttctcctcctctttatgtcccacggccatacacagaagaaaggaagtaagacttaccaggcatagccagtagctgtatctactcactatttgtcgtcttacctttttttagccacaagctgcatagagctattagagacactgacggaaaccatagcaataaacaggggcttgtagtatttcaaaatgttaagacagaaaatccctgtaaagcgaagttgtgtgtttaacctgagcctgggagaaactgagatcatttactgaccccattttctttgggtttggtacctccaccctggagaaagccaagtgaatagctagagttagtggccaaaaaatcatgttctgccccctagaaagacaaggtaaagccctttaggttatgcaaaaataaaacgtaaaaaaagatgttatagaatattagcttaatagtggcaagatgagttaaaatgatatcatttctttattccttcaataagtatttactgagcaactactatgttcagggcattatactggattcactaaagtttctctggtccctacctccagagtcttcagtataattgggaactagcataaaatacaaaccaaaacaaaaactgaccctagaaatcgacagttctatccagatacatgttcatatttagaatctttaatctagaacatgtcagacccaggcttagaggtggagatgtgcattttgtcattatgaatcacttactttgtatataagtttctagagtttagtttcatatttcatattcaaatggcaaaggtgtgcattcagttttaattgtattcctgcagcaaataggatgataactgcaggaagctgaactcatctcattcagtagagaaactctcatgattatagaatgtactttagagtctctaacattggcttagtgtatttcgctgatgttgaattttttcttctacaggaggcaaagggagatttttctaggtaagtttacaattttgttgttgtgttgtttaaaatgtaagcccttgcttctctattaaaagaaactaatcaggatgtcctttttaggtggacaatttattcatgttatatgttaatgatgagatctaactctcaacttgtccactgaaacagatagatcaggtggagaaaatatagtaatagcaagggagatattctccactacatgcaaagcccggagattactggaaagctgacattaggcccagcgtcacacatgcccattgtcctgaggttggacaggctgctcaaatgtctcgtagaggctggaatcaccactgtggtgtaaatatgattgcagataacctgtcagtcctgacaagtaggtggacatctttttttctctcaatgtagtccctgcccctcaagggacaaaatactttcttacagggaaatttcattcgtgaaaatgttacaacataaaaataccccacctctgctttccttctgtcttaggatattgtgttggagaaaacataaacagacaactactgggaatctgtgaatgttgttaataaccctgtaaaactgcaaacttgtcatttatttcattcatcaccatatgttgatcagtatggctgaaattgccctgaaatcgccctgaaatctcttgtgatcatcaccagaccctgcacagagcagagggtgtagccaaccactagcaggactatctgctcaaagatagtcgttattcctgggattctgtttgatcaagctcctctgaaaaaaaaaaaaaaggccagggtagcccattctggagaatcaaggtttagaggcaaaaagagtgaaccacatgaacaggaaaggaaagcatcaaggcgtaaggttctggcccattaacaggaaattagcaaattggtattaaaaagaaacacagatcgtacctctgctccatctaagaacctgtctgtttccccatgctttgagggattttatctgtaaatgcagcaaaaactacttctgttggtggccacctgtagttggctgtctttgtcactggtttttcaggtctcaactgctttctccttgctctccatgtacacttctcatgcttgcttttttattattattattttttaatttttttcagagacaaggtctccttctgttacccaggctggagtgcagtggtgcagtcatgtctcactgtaacctccagctcctgggctcaagtgatcctcctgcctcagcctcccaagttgctgggactacaggcatgagtcactgcaccgggctaattattttattttattttttgtagagatgagctctcactatgttgactgttctcagtcagacatctcagcaaaagcaaaaaattattttacagtctaaaacaaggatcggcgagctttttttgttgagggccagattgtcagtatcttgagttttgcacgcagtacgatctctgtttcaattacacaactcttcctaagtgcaaaagcagccccataggataagtaaatggatgagcctgattgtgttccaataaaactttatttatggatacagaaatatgaatttcatataaatgttcatgtatcacaaaatattcttcttcttttggtttctttttccaatcagttaaaagtgtaaaagccatccttagttcatgggtaatacataaacaagcagaggactggatttgtctagggggttgtagttgctgactctgatctcaaatgccatctcttcagctctgtttgaatatttgcataaagagacctccaggccccttttatttaagttctccaagtttttggtataaagcagtggtagtcaaatttttaaatagataatgactgtaagtagctttggctggagaccttgaactttgtaggtggccagtaaccatttaccgaatttgctaaacataatgttttcaggttacagaaactaaatcttgttacaatttttatttgtcacttttttatgacattaatttggccttggaatttggggttttgataagtgccagtccatatctacttacaaagatttctgaagtcccatgaaaaaatgatttaaaaaccacaaatccaatggattccagtgtctagtctacttactcacatttttccctccacatttctttcgccagctctgaactctgctgtaaatattatttattttgagagtaccctgacgggatggaatgtgaactgggaatagcatgatctggccccacggatcatgggaacgtgtggccacatggattgccagggagaaggaagtgcaggcttggcctccacagtaattcatggccccctaatgagcttctggaatgccagcttgttggctgaattcaaagaaacaaaggatccgggttgtgctccatttgtcaaagtgctactgctacctagcagtttgtttgtaagcgcagctgtctgggaagagaaatcactgtcaggagaggggagaggtcagacaccttatccaaaaggtcagtttatctcacagcctaaaacctacaccatggacggtgggggtgatttgttacatgggagtctctgataaacaccctttttctgtagcaggcccatgctagtaaagccatcttcagaggtccagagaaactagtacacttgagtggcctaaaattgtggagtaatagaagtaattccaaattccttcccatctgcttctgggaagatacccaacacgtcgaaattgaccacattcggttcagtggctaaacattaggtattttagatgtcccattctcataacttatgtaatttatataaataaatttatttatgatttattatagaaagttgtttttgctattgatgcaggattttttgctccttagttcaactaaaatccagcttcttgtctcacgaccaggaaaaaataggcacatggacacactgaagggagaggagagtggattattaagcgaaaagaaggctctcagcaaaaaaagagagggtcctgccaacaggctcccacctcacagattgaatatcagtctcctcccctgcataaggcatgaattcttggtggctccacccccttctcctagtgcacatgtgggccccagtcccttgcaggcacgcccgggcaagaccctgtgcaggtttccttatctgcatctgcatgcctcctgcatctatcactattattaaatgcatgactatataacctcagttttatttaaaggaatggctttgacttccatactgtagatatgttttcctgaaccacattaataaaataccagcttagaacacacagaaccctagaaaaggcttttctagatataacacagggtctagggctgaactcaaagatcttctaaaatccagaggatccaataaccttttaaatgaatggccacacacaaaagataaagtaactctttcatagcctgaaaggtcctgaatctaaaacttcccaaaaggctattttcttcaggatactattatcctagatatttacatttcagggactatatccaaattacatttatgtggaatgagtattaattcataaattatgggagcagtttccttgaggtacaagagaaaaggggattgcttttacaaaagagaagtcaagggctgggtgtggtggctcatgcctgtaatcccagcactttgggaggccaaggcaggtgaatcacctaaggtcgagagttcaagaccagcctggccaacatggtgaaaccctgtctctactaaaaatacaaaaattagccaggtgtggtggtgtgcgcctgtaatcccagatactcgggaggctgaggcaggagaattgcttgaacctggtaggcggaggttgcagtgagctgagatcgtgccattacactccagcctgggtgacaagagcaaaactccctctcaaataaaaaaaagacgaagtcaaaagtgctgatacaccttaatggaaagagaactatataaagacaactgtgaaccgtagctactctttctcatgaaactcacttgctcttccgtttcttcttttgggctctctgttttgctcagcagatgcctgaaggcttattcttacataactgtcttttctttcccactaacaaaatagctcacttccttgtcttattggactttacactgaaatgtcaggtttagcgtgctgagagaaaatgactgttatctagatagatgattagtatcgcctgccatagaagagatacagaccacacatgttcatattctaccaaatggaggacaaatttgtacgatacttctaaaggtttaggaaatagtcttatctaaaaataacattttttcacttttattgttttccttagcacagcatgtagtaatctcatttcatttcctgatgtatatacatgtaaaacaaaaaacctcatgtctgtcgacaatcaggaagtcagtagagttggcatttctctttaaaaacaattcagtagcctccaagctgttaacaaaggcagctgtgggccaaatatttggaagacaagaaccgatgcagtttaaaaacaaaaaattgtctttcgataatcgctgttgaccattggccaactaactaacagacattatctatgattcttacatactttattcatcgtaaacagtgcagggttttgagaatggagcactgatgttttctgtttcaaagcttttttaaaaactcttgggttatgatagaaaaactaatgttctcttccttaaaaagttcagtgcagagaatacctcatttaatcgactgataggacgtccaattttctagttatattctaatttaatttaacagaagtctcattgcaacactgtactgagggagatatcacatacaaaaacttgattttttggtttttgtctataagggaccttaactgaaaaccttatcagccaatctccttaccctgattttgagaatcacttcacctctgccagcccttctgatctttctaaaaatgtgccgcaaattttcttaaaataataactttaagcaaagcatggtggctcacgtctttaatcccagcactttgggaggccgaggcggatggattgcttgaggccaggagttcgagaccagccagggcaacgtgacaaaaccccgtctccactaaaaatacaaaaacaattagtcgggcatggtggcgtgtgcctgtagtcccagctacttgggaggctgaggtggaaggattgcttgatcccaggaggcagaggctgccgctgcagtgagccgagattgcaccactgcactccagcctgagtaatagagcgagaccctgtctcaaaaaataaaataaaaaataacgtttagcattttgcaatattgaagtacttttaaaatgctttgcgctaaacaatgcaaatcacaaatgccaaaatcacactacctttgaaataaagaatcgtccatacattaacagagacaagtaaaaaacatctgttctatagaattttttgttaacaagatttattgaaaccagatcagtaaagctgtgttactctggaccctcttctgggacctggaaatatttttgtttccgaggactggatatactgatgctaatcactaaaacaggattctcccagcatgagatttattaagaccagaaagcaaacagcacctggaaaagacagatagtaaggaaattccgtgtaaagattcttggtccacgttttgcctacctggctctgttcagcagaacccatcacatgcttaagaggcgatggaagggaccctgtgtctacaggctcaccattccaaataaacatagccaccaaaggaaaagaactcaggttttgattgaatacttgggggccagtttacatgacatctctacaagatgaaatgccagtccaagtgagagaatatcagcttatcagagcttagtgagtgtcggctaagaaatcttagtgtatacctgcggtgtcagtctgcaagttactaattctgtttctttaaaacaaaaaatgaaaaacagcttgcttttagaaacagaacaatgcatcacccaatcaatggaaacaaatagtagcagtccctcattaacaaggaaaattgattttcacctccattttagaagaggagttggagtatttatttgtgctgaaaaattcccattaacttccacaaaccacatgttattaggtgcccaggggagcggttagaggcaaaaatgtaaagaccttttagtattttatcttctataaaccatgggatggtgtgctcactagtgtggaaagaaatttttatggcccaaaaagagtgccttcttggttttctctttctttctttgaaatctgttctgcctttataaagagccatgtgtgaattaatataaactgaactcaacttactggtatccgaaaattccaggtttgtaagtcttttttgccaggccagagggtgccttttgggaagtcacaggctagaggaagagctttagatgatcaacaggaaaagaacacgaagaactaattttcttctaaaagactttttttgagtaatataaacgtttatatcgattgcgatctttaaaaagatgacaaagtcattttcttgccagctacaacatggagacttgattaatctaaagcagcagtctgtaaatcacaattcctagtataccaatatcatttccctgcacttacagaagtggttttactaccacagctttagctctagctctagctagctcggtttcaaatcgttattagatcatttggggcatatttccctacgatttttaaattgaccacttgaaaataaacagctggcatgatcatatggtacgagaaatagacttgctgaggcttttagataattcctgaaaaaatactcagttatgtctgaaatagttaacattgggaacataacttatgtaacttaacagtaactttaatatctacctaaactttcaaatttccctgttggaaacatcctagaaaaaaaaaagttgatctgttaaacttgaaacacacctaacagcccaaagaagagtttttgtgggaagaattgaaattaatataattctcatatactatttatatactgttttacacacacacacacacacacacacgaaagaattgtgtgtggcgttttcccatgatttaaaaatgactttaagggccatgagtaattgaagagcagatggaatctttcacaccagcaagagcttttgaaaggaacagaatctgtgaaaatttgaagcaaaatgttcaagtggaaaagttataaattgttacagaaagctttgttttgtgcactaaagtctatttgatggagctttcaagtgtgtaattcacattttcaaagcataaaaaagtatttggatagggatagggtagtttttttttttgcaggatgatattcttcaaattctatgcgaattgcttagaagccaagtaaggaggaaattttgtattatgacagcttacttcttttgttaggcatttatttaacatattaaaatatcatattttcagttatacctgtgaacagcaaaacgtttcatggctatggtactgtgtcagtttttcagagtggaaattctgaaactaaagggtgatactgagaaatatagaaagttaatcgtttcttcttgggctttttgagaaaattatttgcctgaaattgtagacttatgaaacaatttttaaatttgtcttaaattttacatgtttatacctaacataaattagaaattcataaaacttcatttcaccccagaaaacgagactcggtaatcaaggaagaaatccttacttatataacttaacaattagcaacagaaataaaggcactgccagacactgtggctcacgcctataatcccagcactttgggaggccaaggcaggaggattgcttgagcccaggagttcaagatgagcctaggcaacatagtgagacctcatctctacaaaatatttaaaaaattaaccaggtgcagtgataagcacctgtagtcccagctgcttggaggctaaggcaggtggttcacttgagcctgggaggtggaggctgcagtgagccatgatctcaaaactgcgctctagcctgggcaacaaagcgagaccctgtctcaaaaaaaaaaaaaaaaaaaaatagaaaggtacatatttcatcaatgtgtttgcaatgttgcccccaacaaacagttggtaaattcatgtgatttatctatgattcatgcccagaattcagaatcccatgctggaaaaacctcctggggcctccaagtgattccctttgtctgtgaatggtcacacactatggcaggaaaagtttctcagacagatgggacccaacccaatggtggaagacccctgcaacatttctttcctacacacctggggaaaaaagcatgtgattgggcggagataggcaggtgctctcttttctttgttgtaacctcagcttcaccttggtttaccaaaaaaaggaggaggaagaaaggaaagggaaattaaagattgtttcctgcatgatttcttaaagatcagcaaagaatgaaaatctataacttccctcattaatctgtctcagttttctaggtccactgtatgatcgaacaaaggaacagagagccacgtatgtatatctagaactttagggtctcaatgtttacgaattcagaacttggcaggatttaggcaggtaattcagggcttgtacgacaccctgggcagggcctagggcagcacctggaattaaacacatcaacacctccagcccaaaacatggatatgcgcagcaagtgggcgcaaatagaaaggtccatcattgcctcatgcaaaaagatgaagtttgccgccagatgggttaagaaatgtttcttagactctagctttttgaattttggaattgtgataatggatgaaggacctgcaacactctacttatgaaatatcccgcccctgagaacttgaccttcatgattctgctcataaaatatggaggagtgaggccaatgctagcattatattactgtttctgaattgcaggctgttcctttctgttacgatagtatcacattctgggttttgtgctctgctgtttttgtaccagtgcagacagaaacgactggttttagcaagaattctttcacgctaagcctattctgttcgtcccaagtttctcccacaaattacatacatctcatttgacccagggggactttcttgaaaaagttatttccaggttttttaaagaaaagcaaacacattgtggattttcctcatccttccctctcaggtttaatttttgctcccttcactttgtggcatcttggttaaatctgctgttcactgtggcaaattctctatttgatatattgctagaaatctttgtttttccccagtagatcattctaactttccttgtttcgtgaggagtataggctgcagaagacaggcacatcatctcaaagaaaaaaacaccactaaatcgaagaccaatacagcattgataccacttttatcctggcaacgttaataactgccggagagtttttaataaaaactgattcatattaaagataagaagacttggatgttattctcagtttagcaactggcttttcaagagaactttttgcatttttctttttcttttctattcttttggtttttgagacagggtctccctctgttgcccaggctggagaacagtggcatggtcatagctcactctaatgtcaaactcctgggctcaagcaatcctcccactttagcctcccagatagctgggactacaagtgcaaaccactacacctggctgttttttatatttttatttttaaagagatggagtcttgctatgttgcccaggctggtctcaaactcctggactcaagcagtcctcccaccttggcctcccaaagtgctgggattataagcatgagccaccacatccagctcttttttgcatttttctaaaaatggaatgcagccacagtgaactgtcttaaggtgttttataagttggcatttatcatatgtcatgaactctggggaaaatgtcgaagtggaagacattgagggaggaagctgtgaacttctagaacattcgttaggccacagccttgcaagctctgggggtagagtgaccaagtttcccattaggggagctttctgattttcagccacagagtttggccagattgacagggctagacacccctaagttattgcagatgtttataaacagcagaaaagcaaacagaacatttctatagatttgtcctcggggaaggatgaagggccatggatcccttccagaatataatggatttggacaggtttcacgccttggtgatttcttgttagatttttttgtgtgtaaccttgccctggagcagagctagagaacccactgcaggcttcagtgaggaaatcaaacctgtggctgtcatcagggcaacttgtttgccaacaagcaagggtttggtgggtaaaacgatcccttcctcctggagttccttccttccccaaatatactttagatgtgatgggtgtgagtgaaacccaaactcaagtttcagctccttcagggagccactaattgcctttctcatggtttcatccaataaagttgatctgagaaaagtgcctttcacattgaagccagccctctgtgtgctgatggaccaataaatcaaatcccttttctcagggaacttaccatgacgcagggagagaagatccggaaattcatcagtgtgggccctcgagtgtttggtgaattgaatacttgctgaaactatgcctttatagcatgtgcttaaaaattaccgactgtacttgggattggaattgagttttcctgaacactaggagtttacccgtttgaaaatcaccaggtgctgtcctgctgtctgcctcctggatcaaacccaggagaggctgaaccctcttagcctggcattaaagtttcacaattctctgcctgacctgcccttttcagtgtattgcccctgacattcctcttactctgatggatttcttcagttcatgtggcttccatgtctgtccgtgttcccctcaggagaagagtgatattcctatccttttcttcgtgcacggcctcccccaaagccagtcttacatcagagcccaagggtgcctttatttcctctgagctttcgtgtctgctgtttggattgacatgatcacacatcacccctgtggtcagtgagctttgtaggagctcctctcaccttctcagctaaatcgtgggcaccttctggttaaggaccatatctcatcattttttatatcctctacaattctttccatgtaatggcaggggcttcataaacaccttcagcttattgattatcagttgatctgtcctggccttaccatttagattctaacagttcaagtacttggatggattgattcaaacagttacactttgagcttttccctctagttggtcatggtcaggattcaccaacaccactggtcatggtcattgtctttccttctctcttttctttctttctttctttctttctttctttctttctttcttcatttctttctttctttctttctttctttctttctttcttccttccttccttccttccttcctttcctttccctctctttctctctctccttctctctctctctttctttttctctgtctctttctttctctttcccttttcttttcttttctttcttgatagggtctccctctgtcacccaggctggagtgtggtgttgcaattacagcttactgcaacctcatcctgggtaactaggactacaggcatgcatcactgtgcatggctaatttttgtattttttgtagagacaggatcccactatgttgcccaagctgatcttgagctcctggactgaagtgatcctcccacttcggcctccccagatgctgggattataggcatgagccaccacgcctggcctcattctttcttagggcaacagaaaaatgctttttctgggagtgctctaatgtcaccaaacctccatgtctttctttatcaccacacacagacgtaatgtattagtgtattggtgtggttttgcccagtggcactgggcatccaatggtgacgctgatcattgcattgcccttggctgtatttctcgccggggacacagggaacaatgcatcctccagttagcagcataggtgctggagtgtccaccatccaagcacctgaggaactcccctctatggctgcggtattccttccttccttcagagttataccttgtttcattgctttttagcaatgaaaaacattgctaaaaatgaaacagttatacctgtttcattcctttttagatggcactgcccagtgtcctggtggccagtatttgccttggttaatataagcaacctcgaagctgctaacatagcccaggtcagaactgcgaatcaaaggcagaatgcacctacatgtgcctttgcaaccccggctaaggcttccaaggctctttggtggaccaggatagggaaacgctctttcagtatcaaaactgtcccaaagtggctgccgtttgttgctctggaggtagtaagtgggtgcagacgccacagatggtccggcccagaggggatgcagacctgctgagtgtgtaaggaggagtcagtcacctgaagaaggctggttaagctaggggagtttaaagcatcttccaaacctaagcatgtgtgagtctacagggaaaagaatttctggtttcaggaccggatgcataaaactgcctaatggtacaggttgagtctccctcatcccaaatgcttgggagcagaagtgtttcagatttctttcaggctttggaatatttgtgttatataccaactggttgagcatcctcaaatctgaaaatccaacatccaaagtgctccaataagcatttcctttgagcgtcatgttggcactcaaaaagttttagattctggcacatttctgatttgggattttgggatatgggatgctcagcctggcccagacaacgcagttcacactttctaagtagtttctgagcctcctcaaaagcaaaagttacaggttgagtctccctaatctgaaaatccgaaatccaacatgctccaaactcagaaactttttgagtgttgacatgacgctcaaaggaaatgctcatttgagcactttggatttcagatgctcaggttttgtggggctcaaccagtaagtatataaatgcaaacagtcaaacatctgaaaaaaatctggaatctgaaacacttttgctcccaagcatttccgataaaggagactccatcagtatttatttgtcatatttcagaaaacagtttccagcatgtggtcaacgtaagccatgaaaaccagctttgtgtattagcagcgcaaatgctcttagggagacagtggcgccattgcccattctcggagctctgtgagcctaacggcggggttctggggagcttcttctaagatcctgccctgggggacccctggggacacttcttctccccaaattcctgctgagggctgctcaggggcgttcactctgtgcccttcagtgagagcagggtttgggaagacacccctggccatctgaaggtgttttgccctgctttctgcacggtgaaaggcggttactgggcttggtgtgttctgccttcgtttacatctgtatttcggaaataaaaagagagcgccccttccccccactgctttttattaacagggaagcagatgtggggtctctcagacaagacagcggcccaagtggtatcagagagtgcgattattttctcagagggtgagtgcgtttctgggcattctctctttcagcaatgaagttgtgaggagtgacttgaagaagctgccagcccttcccacccaagccctgaaggagcacccttccctggcctactggtaagacccctggagtcttccccaggagcgagtccctctcggggtgcgaggggacacaggacaactgaatgtaccctccctccaccagctcccacgtgccagcctggacttgcagctgtattaagtaccctgtgtcttcctgaaaccattttctgcatttatttatttatttatttatttttaaaataattaattaattttttttttttgagacggatctcactttgtcacccaggctggagtgcagtggcatgatctcagctcattgcaacttctgcctcaagcgattctcctgcctcagcctcctgagtagctgggattacaggcacgcaccaccacacctggctaatttttgtatttttagtagagaccgggtttcaccatgttggccaggctggtctcaaactcctgacctcactcaggtgatccgcttgcctcggcctcccaaagtgctgggattacaggggtgagctaccacgcctggcccgttttctacatttacttaagtgaagcactgtgcctgagacctctccttttttgtttcttcttctttttttttttaattttcaaaaagaataccttctaaaatttcactttggaagcttcaccgccttcgagagcctttcatgtgctgctagagtttcattttggaacacctgtcatttgatgacagcatgtgtgaggttttgagacgtgggagaaccacagggttttcttctttcagaagagggagattgattgttttattttccctcgatgtttcacatctcctgatttagccactatgtaacattatgccatagctcatctgtcggccctaaatggctgattctgaatgattcaagccatttgaaagactcccaggttgtggtttgggccacagttgggcagggcttgcattcctggataatgttttgaaatcctactgggttcctaagccctggccactgacctttaataactgtaatacctcttctctgatgttccttctgatcccctaacagaaatcattgcaactccttttatttaaaagcaaaacaaaaagcacagaccaagttgattctaataaactacaatacgtgacttgtgtaagtgcttttgatgacaacttctgaactgtatggattatgagcattttgtcttgtctggacacttatccagacagtgacctagttgttcactgattcgtgtgtctggggtagggcatgtcttgatgcagggctcattagcagcattgaactctggctcataatcccagcactttgggaggccatggcgggcagatcacaaggtcaggagatcgagaccatcctggccaacatgatgaaaccccgtctctactaaaaatacaaaaaaaaattagctggacatgatgtcgcgcgcctggtgtcccagctactcaagaggctgaggcaggagaatcacttgaacttgggagtcggaggttgcagggaacaaagattgtgccactgcactccagcctggcgacagagcgagagtccatctcaaaacaaacagacaaaaaaacaactctggctcataaatcacatctctctgagagaccacatcactagggagctggccccaagacccgaggctgggagctcccttccgtgtctggcgtccctaatttcatctctctgagctgttttattgccactcctcttttggaaacatagatgtaaataaatgatggctttctctaattataacctgcccccaaagagcaaaatctgttaacttgcagggattttgcatgcatcagcttccaaatgtcgagacttgcaatccgaacccccaaaaatgatggtcccgtttccttgttcatggaccctattacccacctccctaattccttgtgccactgggcctcatccctctgtagcctcctggctgttcacttccaaaaatccaatggtcaaggccctggggatgtgagaaggtaactagagaggaccagggaggaatctctttgcctctgagacctgtcctgttgtgggtctcttagtcatcccttcattcattcctttccaaaccttagaacattgctatgctcatctgagagttttgaatttcttctctcctccctgtgtctctggatttctccttcaccatctccattatctgctctgtactcacacatgattactaacccagaggcacctcgcccttcacacacactctctctgtctcttctgcatatgaacatcttcacctatagctggcttggcagaacatcccataccatcacgaccaggccagcgctttccctgagcctccttcagacccataagtgcccaagccagtgttaaatgccctgagagtgtggcaggacgggggagccacgtgtatcacagtcagcatcacagcccagacgatgtataaaagtcaatgacagggaccctcctgacgataccctactgaaaaacaacaaccacaaccacaacaggccctttcacctcatttcactgtggttggctacttgatgttggctctaatatttcaaccttatttatatggactttgattcttattgatacataatagttgtacatatttttcacgtatatatactctgatatctgtacataatgtgcagtggtcaaatcagggtaactgggatatccatcacctcgaacatttatcttttctttgtgttgggaacattacaagtcttcacttttggctactttgacatatgcaacaaattattgttaactataatttccctactgttctatcaaatgctagaacatattccttctagctaactattttcatatccctatatatacatagatttttaaaaagcaaagccgcaaggagagggataagtgctgttcctccttcctacagatacagaatgaagagagagcaggtgcacacagcttgttcactgcttttccctctgggcctcagattcaccactcagcaaggttaaccaggacccctcactggtgggggagacgtttttacccgtctcatcacagttacccagagtgtcaagttcccctgatcattcctgaactaaggagctgtactcaccattcttcgggggctttcctgcccccgctggagttcgcacattggatgggcaacctgcaggctgcagcctggtaaccaaggcagtgggtcttagcatcccagccaagcctctgcagtgactagccaggtagctttcatcaatttctcctctgcaaaatgggatgacgtacaccaacctacttgagacggtaattaagagaggaaatacatagtcacattatgtcattaaaaagcagtgaaagcagcataataatgctgagttatggtgcaagaagcctttctgctaattctccccatgcatttaacaagcatggacttttcacaccgtgcgatttccctgttgaggaggcaactgaggcagaaagttagaatgatgtgcccagggccacagaacaaggagggatcaggaccctgacctggattctgcctcgcgggcctagtttgtaaatgctggaccacctgaccacccctatcgcctcaataaggtatgcagggacatctatttttaaccccgaaaccactgagcacagcaggccagcagctgctccaagacggggaaccatatcatatcaccatccctgtttccccttccatcacccatgcatttcatgtatccccttgtctgctgagaggtcatttgacttaacaacatgacccagccagcgacctgggcacaggcagctttgatcatttgcctttttcctccatgtaaccctgtgtcctccaggcagcacttactctgcttcctggatttctgctagttatccccttgagtccctgctacaaatctagggtatgggaaaattgtctgcaaagctcagagcacttcagccctctggcaagttccagagcagaggtggggacaggctgggagcagaataggttctcggtcaggattgagcctgttcttccaggataagcccaccatgtttaagggggcaaaacaagcaggaaaagctgaggatggagaaggcaattattgtggcttcacagatggcctcagagagcaggagttacagggcaaacagggggcggcaaagatttctgcagctgtcggccacccagaaccctgtggtcaggacatgtcgtggttaaacagcgacgcggctttctgacagtggttttgactttctttcactggtgtttctcctgagccttctgtgtgttcatggctacagtgctatgttgacttgcacctcctgaactcaccccagggaccctctctccctagtgctgcaaaggaaaaaggtccctatctacactgagttgcttgaccctggatctaggagtcaacttcacaaaaccccatatcacgtggtaggaaacacgccaaggcagctgttgatttagtgagtgggatggaaggaagtggagccgctgaacctcctgacgcagttctgcaggattagtgaggctgggcctgcccttggggagcatgcttttcgagaatcgtcttcaggagacgaccttgtcacacttgatatagaacttcctcggcatgtgggagccaaggagagagatggctgggtctgcccctttctgaatagaggatatccagaccccacagaagtgactctccaactgaggcaaggccccctgtagctggctggtcctcattctgggtatttataaagacccttctttatcaagacctctcactgtcctctatgcatcaaattccagagtattaaaattaaaagatactagttggaggttaaggtagtcattggaagagaaataaattacccccaaggactaggtgatgaatgtgtagaacctgttacccccaacactggccttgctaaaactgaaaacaaaaaggtgggtaaaagaaggctttaggtagatcctgggctgatggataatagataatagggccgggtatagtgactcacacctgtaatcccagcatttcaggaggctgagatgggcagattatttgaggtcaggagtttgagaccagcctggtcaatgtggtgaaacctcatctctactaaaaatacaaaaattagccaggcgtggtggtgcacacctataatcccagctattcggaagactgaggcaggataattgcttgaacttgggagatggaggttgcagtgagtcaggatcataccactgcactccagtctgggcaagagagcaaaaccttgtctcaaaaataatagataataaagatcctctattgagatctcaagggtacacccctagaatcagctcccctcacagagctttgacagaggacagggagggtgaagaggagtaagacctgagagtgagaactgaggttccaaggctctggggccagaccagggagaccgaggtgtcgactccacacctcagcaggtggggttggggctttctgcctgcacctgcttccctgggattccccaggttggctctgcccttccgaaagcgggggtgggagcggccgtatctcctacctcatgggcaccagagtcacttctcaggaggcaggcttgccactgctgccaaggagccagctaacctcttgttatattagaactaggatttcagctgggcgcggtggctcacgcctgtaatcccagcactttgggaggcaggggtgggcagatgacctgaggcccggagtttgagaccagcctggccaacatgcaaaaccccatctctactaaaaatagaaaaattagcaaggtgtggtgacacacacctgtaatcccagctactcaggaggctgaggcacaagaattgctttaaactgggaggcagaggttgcggtgagccaagatcgctccacagcactccagcctgagtgacaagggagactgcgtctcaaaaacaaaaacaaaaacacctaagatttcaaaaaaggagggagcgcctgtctaattctggtagctggtttgctgttgttctccaagcattcctatggggcttttgttgcttcatggttcatattaaccaagcccaaattccagaacattccatcctcctggaaagccttccattcctgactacgcattcagagcaggtaggctgtgggcacttggttaaggtcaatgcctgccattcccccatgaggccctgtgtgaacaggactgggaagatgaggataagaagggccccagggagctcagcccgggcattcatgcgtcatctctgctgtctgcttcctcttgttcccacggtaccatttcttccaaggagctgatcccaaaacctgggctccagtctttttgttcttttgttttttgtttttgagccagggtctcactctgtcacccaggctggaatgcagtggtgcaattgtagctcactgcagccttgacctcctgggctcaagcaatcctcccacctcagcctcccaagtagctgggactgcaggcataccccaccatgcctggctaatttttgtatttttgtatagagacaaggtctcactgtgttgcccaggctggtctcaaactcctgggctcaagcaatccccccatgtcagcctccctaaacactgggattacaggggtgagccactgcacccagcctgggctccagtcttatatttcttgattagaaatccaagataagccagccatggtggctcacgcctgtaatcccagtactttgggaggccaaggtgggtggatcacttgaggttaagagtttgagaccagcctggccaacatgatgaaaccctgtctctactaaaaatacaaaaatcagtcaggtgtggtggcacgcacctgtagtcccagctactctggaggctgaggcacaagaattgcttgaactcgggaggtggaggttgcagtgaaccaagatcgcaccattgcactctagcctgggtgacagagcaagactccgtctcaaaaaaaaaaaaaaaaaaaaacatccaagacaaagagaatgcaagtcctttgtggggaaaacagactctttttaaagtaaatctacatccaaatagatagcactcagaccgagtttggaaataccactccaggacaaatcatttttccaggagctgttggtgccttggagcttcttatgagatggggctgagaaatatcttactggcaggaagcttggctgttgacctagagactccaacaacagcattcttttcttctaattacagtgaagacagagtcattgagcactacaagaaactgaacggtcagacaagaggtcaagcaatcgtaaagtaagtggccccttcccagctcacatggggacagtgtttgtgtgtgttaatatatcgtatgtcaggattgttcagttcctctccaaagacatatctgggagtggggggtgtatgtttccatttaattttcaagtaaataatcactccgagaactttatcacgtacacatacacaaatatatatatgataccagatctgctgaataactagccttttgcgcattgtgtgtgtgtttgtgtatcttcgtgttgtcattccagctacatgagcatcgtggagtctctcccaacctacggggttcactattatgcagtgaaggtgagtagactcatttggtgaaggttaccaaacctcccctaagcaaacaaatcaaaacatctcgttatacgttttcttctttttctttttcttttgagatagagtcttgctttgtctcccaggctggtgtgcagggtgcgatcttggctcactgcaacctccacctcccgggttcaagcgattctcctacctcagcctcctgagtagctgggattacaggcatgcgccaccacacccagctaatttttgtatttttagtagagacgaggttttgccatgttggccaggctggtctggaactcctgacctcaggtgatctgcctgcctcggcctcccaaagtgctgggattataggcgtgagccaccgcgcctggccctcattgtttttttctttataattcctggtgggaatggaggttgtggaggacttggtcaggaagattgcacactgcggggagacaatttcaaatacagaaaacttcatccagttaacttgcttcaacctgtggtccatttctttgtcagccctagaacttaacagaaaggctgcctctgatatatatgctttctgccttccaagaaaacttcaaaactgtgctctttatttcagtttggtaaagatcagaagcagggcttgtgattttcaaagtgccaaaggagtagaggtgtttggcacttagaacctcaaagcataagcaatggctctgctactaatttggaaaagagcacgaatccaggaaacctggcccagctgcaccaggctccctgtctggtggccttgtggtctcactgatgccatgttttatggtgtgatgacagcccttctctggtcaatctgctgttgcagtggcattgggtttcctcttgttctgttctctgaaaccgttgcagtgcacacagctgcttcccagaggcaggggtttaatacaaggattttatcccacctttaaagttttaagaaatcatatacccagaagcttgaaaagaaatttcaaaatttatctcttttgcctttcatctttttgctcatcttgaaataactcacgtcccacaaatatttcaaaaccgtgatgccagtttcaagttttccagacacccactatggggttgtattaggttatttagaaacttggcaattagggaaaagctgcttgatatgctcactataaaatcctagcttctgggggctctaattaactcagaatcatcctatttgaatatagaattgcaacttacgctcaggtgacaagaggtctctgttaataaacagtgggggcaggcgcagtggctcatgactgtaatcccagcactttgggaggccaagacgggtggatcagctgaggtcaggagtttgagaccagcctggccaacatggtgaaatcctgtctctactaaaaatacaaaaattagccagacgtggtggcacgtgcctgtaatcccagctacttgggaggctgaggtgggtgaattccttgaacctgggaggcggaggttgcagtgagccaggattgtgccaatgcactccagcctgggtgacagagtgagactccatctcaaaaaaaaaggaataaacagggacttggtgtttctaattcagtcctgagactgtttcagcttccactgtgctaccctgtccaacagcatgagtcctaaaaccctgcctggcacccagctgtcatcttgggtgagcaggacctcagggtgacaccttccagcctgtgctccccggagctggggaaggtcctgggtaaagctgggccaactctttgctgtgatttgttgttaaaatgagaggagtcactttccatagtctccacagctcctctggctcggaccatcgatgacagtttctctgcccagaaggtccttttattaggtgtgacatctcacagattttcagttgtggtgagtgagcatcccggcatggaatgcctaaattcttagaaggaaaaaaaagagagagagagagcgcaagcagggcattcattccttatttataaagggaaaggacctcggctgtgcggctgattaagagcagagccaggcccccagcccccggcactccccatgtcaccttcttcacataacagagtatccttcaatgacagacgcatctgttaaggaacaaagtagacaggtgggctccatccattccaaggaaatggccctttccctcgtctgcccctgagccaggaaatctccactttgcgtgtgtttacttcctccagtcccatattcacccaaactttttttgatatcctaggacaagcagggcataccatggtggctgggcctgagctacaaagggatcttccagtatgactaccatgataaagtgaagccaagaaaggtaaggctggtctcctgcttgggtttaactcctctcagatccagagaggaacaggcgtaggagtcactttaaaaatgctaacgccatgcagcctaaaggctcaccaatctcctgctaattttagtgtatacaaattactccacagcaatcccatctgagttccctgggtaaatattttttcttttttttctccctgtctctaaggaaatctaagctgttataattacttaaggtgagatgactggctcagttctccccagagcagataggcaaagagacttttgagggactatcctgttccttaatttcgggcagggctgtattctttggaaaaatgatgtaacatttctcttgaatcctgaagccagtctgagttctcccaaagatttctgggacaggatcaggggaggtgggagagctgaaagaagagattgcaggtcaaaaagagctgaaaggctgggcacgctggctcacgcctgtaatcctagcactttgggagcctgaggcaggtggatcacttaaggccaggagttctataccagcctggccaacatggtagaaccctctctctactaaaaatacaaaaattagctgggcatggtggtgcatgcctgtaatcccagctacttgggaggctgaggcatgagaatcgcttgagcccgggaggcggagattgcagtgagccaggattgccctgctgcactccagcctgggtgacagaacaagactttgtctcaaaacaaaaaacagaaaagctgaaaaataagagagagagggtttcctggaaatccagcacatattttctggctcaataaaggtgatcagaaaataaggttatttgctgaagagggagagaaacagaaaacggtttgcaaagtccttgtaaacccaaaatggaatgtttgaaagggatacaacgtttgaattttctctgttttcatttacaaacacttttcagaccagaacaaattgaaaaattataatggaaacatatcttagaggcgagtgctatcattcagatcccccggtggagaataaaggagatggtatgcagtccaaaccctgaaatacatattaaaaacctatgaaaaccacacttgctttagcagagagaaagcaatattgggccattatgtcattccagattgctttccaagctgttttatcctcgaataggattgaaacccacactacatatctaagtggattgtaggctctccagttaacatctgtccttggcaaacttctttattaaattgatagaagaaaaaatgttcccatgttgggaggatttttactccattgatcagtaaggtggttaagttctaagaaaagatgctgagcaaatgatgggggaattattgactgagaacaattcaggaagaacctggctctttggcgggtggagggagtgttgttttgcggctatctccaaagcctttccttatccatttatatgcaacaagaaatgaattggaccccctgttcttaccttttctggctttgtgttcctcaattgtgggatccatacctcttcctccctgtatttttcttcctgttttccctgtgcctttttcccacgtggcatttttaattttctgtgccttttcttcctgagttctctcttccctccttctttttagaacaacccttctctttttgttttttgtttgtttgtttgtttgtttgtttgagatggagtctcgctctgtctcccaggctggagtgcagtggcacgctcttggctcactgcaacctttgcttcccaggttcaagcgattctcatgcctcagcctttccagtagctggattacaggcgcctgccaccacgcctggctgattttgtatttttagtagaaatggggtttcaccatgtgggccaggcctgtctcaaactcctgacctcaagtgatctgccctcctcagcctcccaaagtgctggaattacaggtgtgagccaccacacctggcctgactcttctcttttcaacctgcctgactgtttttgcacttgcaaaagccaagaatactccctaaagcctttaacaaaattctggctgcaatacattgagctctctcttgcctgtagtggtggaagaccaaggccgacatgcataattgaggtctacagcagagataattaaaatccagcagttgaaatctcttctccctctaagctttttagaggacatgctaacaagtattcatacttgtttggttcaatttattaatatgtttaagctttctttattcctctaattgaggttctaatgaagagtgaagaggtgatgagctagcacttgatgtatgtaaaacaggaaaggatgcatagctagggctcagtcaattataactattattataagatgctaaaacaggcttcaagataagaagtaagaggccaaaggcatgaataatcagccatcaaataagagaatttacaataatgaatggaacttatccaggtccatgaattaaaaatgtcaaaaggtcaatatagttttccaggccattgtctctaacccaaactgggttgttattgaaaatcacttgggtttctgtggccttggaggaagaagttagaattttccagcccattcctacttgaaggacagactaccaatctgtcacagccatcactcattcatttgctcaaaaaaacagttattgtggccgggcgcagtggctcacgcctgtaatcccagcactttgggaggccgaggcgggtggatcacttgagttcaggagttcgagaccagcctggccaaaatggtgaaactccgtctctactaaaaatacaaaattagctggccatggtggcacatgcctgtaatcccagctactggggaagctgaggcaggagaatcacttgaacctggaaggcagaggttgcagtaagctgagatcgcaccactgcgctccagcctgggtgacagagccagattccatctcaaaaataaataaataaataaataaataaataaataaataaataaatagaaaaagaagaagaaaaaaaagttattgcatacctattaggtgccaagcacatcactgggcactgagatgagacataaatcctgtcctccaagatgtgtgataatccagccagtgtctgagtggtgtaataggaatctgtgtgagggtcggggatgattcaagaaggcaggcgtcaactgggtgtaaggagaagagaagtccccacagaggaagcagagagtgagtggggtcttcaagggtgcaaagaattttgcagacggaggaatggggcggggaggcatgcaggggagaggccagtgtgcctgaaatcacagtgacaggggtaggggacacagtgcccttcattctggaacatcaagtgaaaagagaggagttggtgagggggctggggcctgcaggctcctggaggcttgaaggctctgcgaagaggacttcctcctctatagggagtgttagccgcggtctatttgaagctgaggagtatagtgtcagatttccattgtcgtagaagcactctccggaaactgcttggaggctggataggaaaaacccaggacaagactgagaaaccaggacatgatgagggtagggcgggcaacacctggcggggcttcaggatggagaaggggaaccaagatgttgagaaggtgtgtgttactcatcacctgtaggcggaagagggaggccatgagagaaggagggcaatgcagaatgactcccaggcttcaggatccaccagagtgtggacgctgagagaagaggaggtctgggagtgacagatgagggatgagtgcagcttaggacatgcaacgcggcaggcttgatgggacatccaggtgcctgtgactagtaggcagttgggcattcagctggagctcaggagtagcaagaatttccaaagcatcactgaaccagagactggacagagggaggaggttggattggcagttggcacaccagtagctaggagtgaagagttcatttcccaatcacgacgatcacggtgagatgcagaggcagcttccgttgcatgggctctgaagcttacataatttggggccctccttaagaaatgaatgtacaatctgaatataaaattaagaacaggcctttggccaggtgaggtggctcacgcctgtaatcccagcactttgggaggccgaggcggacagatcacctgaggtcaggaattcaagaccagctgtccaacatggtgaaaccccatctctactaaaaatacaaaattagccaggcctgctgcgggggcggggcgcctataatctcagctactcgggaagctgaggcaggagaatcatttgaacccgggaggcggaggttgcagtgcgctgagatttcgccactgcactccagagcgagactccatctccaaaaaaaaaaccaggcctttgaaaagcccttgagggaaagcaaaaccttagttttgttagcttctaggggtacccccccaccccgctaagatgtcagatggaacttaaaggcaaggccgtggactcagctggagccattgttaagaagccttagctacaagaagacctaaacggggtgcctgtttgtttttcttgcattgccaacctcatcaccattataaaaaggccatctgtgttatgtttaagggacatgtcagtttctgaggctacaaaaagccccacaccctgatcccagatctcagaatctgaaaagatgcacacacgtgtgaatgcatatcgatgcaagtccgcacctaagccaaaagtctgtcttcagtgcctccaggccagtggctcttaacctccgctgtacatcaggaactcatctgaagctgctgggacatctagatgccacagccccctgcaggccttctcacctacacctccgaccaggccactgagcccagaagaagccccacagggattctgatgtcctggagacaaggaccaccactggcagccctctgtgctttgaaaactcagacatggggaaggtcagccaggctccctagtgtggccagcagtgtccctgcacaccgagggcaggggaggtcccatgcatgggcctcatggctgggtgagccatctgggaggggtggcactccaggggatgccactccctcttggctctggtgcttggcacatctctgccacctcgagcctccagggatgctcaggcaagggagtgacacccagcactgtgcacctggaggcttctgcagtaacagctgcatctccagcccaggcagctgctcctgcccggcggcagacagaggccctccctgacactctgacccagttacagcggctctgtcacgttgcaccaacacaagaagagcccatgtttaagtagaggcagtggcaggggtgagtctgctccctctccttttcagagcccagaggcgtccactgcctgcacagctccaacagcattggcaacccgtcggcacactcacaggggctcagcagccgccttgagaatccacttaagtgtttccatatgacctacccctcatcccccacaaaaaagcccaaacaaacaaaaaaggcaccaagaaagagtagctgatgactgtccagaaaagagcacaacagtagcccgtccctcattctccagttgcaagcagtttgccatcctagtttcagagtctgccctcagtcacttaatcaccactctggagcttagaggctcttgggggttggagtaaaacgcaagggacctcaccggtggctccgagaacagagaacatttaaaccccacactctgctacctggaccttctaaagagacagcctcctggccttcagaagcacagccctcaatgcaagctgctggagtttgtcaaaaaatcgaaaatcacagcttcattgcctgcagggtacacatgtcaggaacagctgaacacgtggggacaccctgcagactggattttggcttttgtgcgtgttcagaagagttcagagacgttgaacttctgaaggccaacttcggtagtattttggaacaacatatatggaagaacagctcccagaacaccctaaaaaaagcagcaaacaagactaagaaaaatcagaatctacaatgcatgcacctcccccagaatatcagcccttgcttgcatatataagttctttttaagaggtcaagcagaaccctaaacactatctgaggataggatgtagaattttttttttttttttttttgagatgaagtcttgctcttgttgcccaggctggagtgcaatggtgtgatctcagctcactgcaacctccacctccccggttcaagcaattcttctgcctcagcctcccgagtaactaggattacaggcacgtgccaccacacccagctaatttttgtatttttagtagagacggggtttcaccatgttggccaggttggtcttgatctcctcacctcaggggatccccccaccttggcctcccaaagtgctgggattacaggcgtgagccactgcgcccggccaagatgtagaattttttataggacattaaatgtcccgtcatcagctctcagtaaatctacttcagtccttcacccaatgatgtttccccctccctctttgccttcctccccacttctgatctcctgtttatactcaaacgctatgtgacacttggggacatccctttgagtgctttgtagctctcctctctcctttgtcatggctacggttggaattcacaattgtgaatgcagcatccaagtacggtgctgacgggatcttacatgtctgtcttggctcagcagtgatgacagaagtagaaaagtcacaatagaaaaaaaaaatctttttttttttttgagagggagtctcgctctgtctcccaggctggagtgcagtggcacgatattggctcactgcaacctctgcctcctgggttcaagcaattctgctggttcagcctccagagtagctgggactataggcgtgtgtcaccatgcctggctaatttttttttttttttttttgtatttttagtagagactgggtttcaccatgttagtcaggctggtctcagactcctgacctcaaaagatccacccacctcagcctcccaaagtgatgggattacagacgtgagccactgtgcccagccaaaaaaacaaatcttgcagcaattgttgtaccctattttatgctagttaccacattccattttagcatgtgcatatgtgtgggaatagaaagaagcgctgctgaggtgagaggctccgtatttcacaaattaccgtcctactgggctcaggagacaatgagacagtgtcaggttggcatttaggcaccggaggtaaatcccaagtttcgtcttagtttgcatttacggtggagtaaagagagctaggccatcagaaaagaaaaaactgccagctgtgtgaaatgactgtcgatagcaacatgcctcagactgggtatcccacgggtttcgggcagttgtgctggtacaagcaagagttttacctctttcttccctggaaacgtttgaatgaaaattaaatgctatctgttgaggcattgtttattaaatcttgcagaatcgggatcccacagggcagatataagtaagtctggacaaaatctggctcacgtccggctctctctgtaggggaggggtccttacgttcctttgattgattgaagcccgagaaagcctgagagctctaatctctgggacaatctgccttgtttgcagcgtcagtaactgaggcattgggagaccagggggttgcacagtccccagacctgcagacaaaccagccatctgatcatcggaagccattacacattaaagcagaaaagactttccaaaaggacactaagagttagaataaagagacctccagcaggctgtatctgaggctttaagcattagagcaaatattgtgaagcacataactccaaaaaagcctcccttgtaaagaatattcaatatctgtaaatcatcacttagaaatgcagcccagatttaatgaaatctcccccctgggaagaaatagcaacatcagtccttgttacatattcagcagacagcatttacttatttatttgatgtgcaattaggggggcttttatgtacacttagatgcacaattaggagcactatggggtcccctctgaggcattaggagaaggaaccagagtaaacggcctgcccccctgtccctaagcagccgcggtggcttccagtgattcctaagggtatttcggaagcaggggcattggctctggaaattgatgcattactttcactcccccggattagtaaagatttttgaatgaaatgagatgatgagacaggaagggaaaataatatttacaggaaatattccattaacttggcgtggactcccggcggcattgccccgctaaattatgcggtgcggtggacgttctgccgagtgcgccgcggatttatcgttctcttctgtcggcgtttgccttggctcgctttctccttgctgggcctctgacttgaccggcctaggtggctgcctccctcattccagcatccacattccccttggaagccacaccctgtgcacacctgggagaaacacttcacttaatgcactcagcattcttagcattttgcagctgccccttactcattcacagtgtaggaccaaagggccttctcctcgtatgttatcattccttcagatcgcagcacagtctgagtggacctgaacgctttccatgcctgtgggtgacagaccctggccttgggcgtctagagaccaggcctacttggccgcgggggcgggcgggggcggaatttgggagtaggaggtggagggcatggggagttcccagaatctgctacttaaaaataactctccaaggacaaaaggaatcatattctaagaaaattgagatcgtcttctcaaagcatcaatcctagacatcctccttctcaaatcaccaatatcagacatggctgaatcatctccatttggaagaataatcccaaactctaaagagtggtcatcggctgggcacggtggctcacacctgtaatcccagcactttgggaggctgagacgggcggatcacttgaggtcaggagttcgaggccagcctggccaacgtgataaaaccccgtctctactaaaaaatacaaaaattagctgggcgtggtgatatacacctgtaatcccagccactcaagaggctgagacaggagaattgcttgaacccaggaggcagaagttgcagggagccgagatcacgccactgcactccagcctgggcaacagcaagactccatctcaaaaaaaaaaaaaaaaaaaaaaaagaatggtaatcacctgaaagcactgagctagcacttagaattccgtacagggtggtgaatatgaaatcctctccaataaaatggcccccatatgagtattcatgggggaaagtcagactcagtggcaactgacttgagtttgcttctgctgatgatacagagacaggaccatgggtccaggaggcaggataccagcatttccatgtgggcctggctgagcaagagactcaactcaccaaggccggtttctcttctcccagtgcttcaaagcaaccctctatcttgcccaccacatgggggtttatgataatatgggttgctatcaatattgaatgaactgctttaaaaaaaaatgaataaaactaaagcactaaacaaacataaggcatttccaattacagacaacacttttgaaagcaccctccgtattcctagactttctagttctctgaaaccctaggagttgttggtgaggatgtgtgactcttcctgcctggaagttcattcacttgttcagtacgtgttgtccaagtgcctgtcaggtaccaggccctgctcttggctctgcagaacaagagagactatgtccctgcatgcacagagcttacagtctagcgggaaaggcagtcaaatttatttattaaagaaagctacagcaatagtgttcgagcactaaattctcccatccaagtactaaccgggcacgaccctgcttagcttccgaaatcagacaagatcaggcgcattcagggcagtatggccatagacctgagagttaaattctacgaagacaataaatcagagtaaggaagagcgggaggggtgatggctggtcaggaggggtctctcagagctagggccgtttcagtgactctctactcccgagtgttgtacatacgattccctgggaagcagtctaagatgaactcgcatgcaggaagtttactggggtgtgccctggactaacaacaaatggtaaagtaaaggaagcagaaccaggcagagagagaagctgatgcagtcccaacatggcgccctcaacctagacgaaactcggaagctaggatgaccccggagccaccgccatcactgttgaggctgggggccaagacttaccccctccccccagcattaaccaatcattagatccaagtgacccccttggcaagagggtggtgaccttgggcaaggtggttctctgtagctgagacgattccgggagagggcgtacgtccttcagtcctgcagggagaaagaggctggtcggtgctgcatggtatcttctacagcagtggttctcagtgtggtccttggaccagcagcatcctcatcacatggaaatgtgttagaaatgcaaactctggccaggtgtggtggctcacatgtgtaatcccagcactttgggaggctgaggcaggtgggtcacttgaggttaggaatatgagaccagcctggccaacatagcgaagccccgtctctactaaaaatacaaaattagctgggtgtggtgacatgtgcctgtaatcccagctactagggaggctgaggcaggagaatcacttaaacctgggaggcagaggttgcagtggccgaggtcatgccatcgcactccagcctgggcgacagagcgacatcgtgggaccctgtctcagaaaaaaaagcaaactaacggccaggctaggtggctcacacctgtcatcccagcactttggaaggctgaggcaggaggatggtagcagttggagaccagcctaggcaacataacaagacctcatctctacacacacaaaatacaaaaatacaaaggagtagtcccagctactttggagccttgaggaggttgaggctgcagtgagccaagatcacaccactacactccagcctgggcaacagagcaagactccatctcaaaaaagaaagaaagaaatgcaaactaaggatccccgcctgagacttacgagctcagaaactctgaggatgggactccgcaatctaattccacaagccttgaaggtgacttgagcacaggcagtggagcttaaggcccactgctctgcatacaggcagttaacgaggacctttctatgagatcctacttcgttgttttgctgttgttatgaagacattttagtctgagttaaagtcaaattctttcctagagcagttacacttctaaacaaaaagagagagatgttttgtaaattcacgaccttcatgacctccatatccactccaagacccaaaacagaagtttcttttttgttttgttttgtttttgttttgtttttttgagacaaggtctcactctgtctcccaggctggaatgcagtggtgccatcatagctcactgcagccttgacctcctgggctcaagcaatcctcccacctcagcctccctagtagctggagccacgggcgtgtgcaacacactcggctaatttttgtattttttgcagagacagggttttgccatgttgcccaggcccccaaagaagaattttcttgaccaaagaattttggcgctaactcacttccttggcactaactcacttccagtttattttagaaagtcatgattagcaatttatttaacctctctgtgcctctctttttatatctgtgaagtggggactaagagacacagaatagatgtagtctaattttctccatcttgaataagtttacttgtcacagagtttctcattccccaggataaaagtggcattggccttgacatagcaaatattgttacagtcatttatactgaaaacaagaggtgggatggcctcgaaaagcaaacaacgtctctttgtgaagagggttatttttttgttggtcactggacctgggaagccagggttcctcggttcccacagggccctgggaaggccatcccgagactggtctgggtaagccaagctcccaagggcaccagcctgtatcttgtgttcttgttgaagcccatgctggtgtcagactgtcacctttgaggaaggttgacctgtctatgaacagaaaaaaaaaaagcattgccctgtccaggtgaataattcttagagagcaactattgcatgagagtaattaatctggaaagtcacaggaggggaggaatgtaattatcccctaaagaggggcaggtctaaatctctcccagggtgacaagcttggaggcacctcctggaaggggtacactcaagctccaagaatctccccaagttgtctctgaagtcagtctccaggcctgacatacccttggggtgctgcacgcctgcccctgccccctgccattatttgccggatacctggcccagcagtcaagacacctcacaattctacacaattgtgagccacttccctgggcctcagttttcttaacaagtcggttgatgagatgatcgggaatcctgatgttgaaggaatcttaaaactagaaacaaagagaaataaaacaaggtaaataaagcaagctcattttaaagccagaggggagtcatgaatgaaagaaaggatgaaaagcaacagttttccagaagaaagtggtaggaggggaaaatgccagtttctaagtaggtaaccccacgtctgtctttgactcccgtggagccagtgctcaagctagatctgattaaataaccaaaagcggttttcctactgcagctgatatgtctttggggatatgtgtctcccaggattcatctgcttcccacacaatgcctggtctcctcgacctgctgttctccctgcccctgaaaaggcacgtggaccagcactgagaaaggccatataaatagccacgttgattgtgtggacagtaggggtcaaacacaacacttggtatttataacatgcaaataaacacccagccagatgacgtagcagccgccctgagactggctggcttctaaataactctacagatgcagattcccattactcagggagccccgttgaccttggatgcaatttgaagaagcaaatcaaaaccaaatgctatcgttggatcccaaaccactgcagaggagcatccaatagcctcgctcgctccaaaagaagccatgaaccggtagtaacctatgaacagatctggtttctctagctggaagacagaagactttgctaggataataagaacatcgaccacctgggactgaatagacaaatctcctttttttttttgagacagagtcttgctctttcacccaggccagagtgcagtggcactatctcagctcactgcaacgtccgcctcccgggttcacaccattctcctgcctcagactcccgagtagctgggactacaggcgcccgccaccacgcccagctaatgttttgtatttttagtagagacagggtttcaccatgttagccaggatggtctcgatttcctgacctcgtgatccgcctgcctcgtcctcccaaagtgctgggattacaggcctgagccaccgcgcccggctgacaaatctcttttatctcccactgttcctttgaacatgctcttcctttatctctcaataaaaacacgggcagtcccatgacttttctgatcactcccaggtattacaacgtcacccagtcactttaaatagcaaaataagcttttattaagaaatcagagtgtccagttctttatgacaatcaaagcttcaaacttgctctaaagttaaatctctccattctcccatctgagctccatccccgcttcagttcgtctgatgtcaggggatacctattaagctctccaggtaaccctaatgaaccctctctttccaggttgaaggagaagagtacatcttctaccttccccctgtgggtggcagagagttcacagaacatctccctctcaagaacatttctaaaaatgctctctcagtttccaccctcctaaacactttatacctcaattgtgggtgagggattttcggggtcatctaaccagaagatatttttcaaattgtgataaaatgcacacaacatacaatctaccatcataaccatttttcagtggccagttcagtaaggtatatccccatcattgcgcaacagatcttcagaactcttgtcatcttgcaaagctgaaactttacccatgaaacaataactcctcttttctctccccccatctgctgggaaccatcattctactttctgtttctgtgagtttgaacactcatataagtggaatcaaagttatttgtcttttagtaaccatagggttttaatatccaaaccaagataccactacaaatgaaaagggacattagtgaataattattccatgatatcaaacaaaccagggttactggcaaacaaagatacatgttgacctagctaaccagcttggtgacctagctaaccaacataaaaacctagctaaccagcttggagacctagctaaccagcatggtgacctagctaaccagcatagggatgtagctaactagcatggggacctagctaaccaacataaaaactagctaaccagcttggagacctagctaaccagcatggtgacctagctaaccaacatagggacctacctaaccagcatggtgacctagctaaccagcatagggatgtagctaagcagcatagggatgtagctaactagcatggtgagctagctaaccaacataaaagcctagctaaccagcatggagacctagctaaccagcatggtgacctagctaaccaacatagggacctacctaaccagcatggtgacctagctaaccagcatggagatctgtctaaccagcatggagatctatctaaccagcgtggagacccagctaaccggctccctgcccttgcttttcacctctcctgtggaatggtctgctcatggccctctctagtgatactgctcatcataaaatgtcagccagaacttccagtttactatcctatggctctagttaggcagcggtgaagttactcacagacagcataattcatgacaaacctgtgtaggtgagaatcaaaccagtgattgggaagaccagagggtcccaatgaggccagccacagtggctcatgcctgtaatctcaacagtttgggagattgaggcgggaggattgcttgaggccaggagttcaagaccatcctggacaacatagagagaccctcgactctacaaaaaaaaaaaaaatttttttttttaattagccgagtatggtggtgcatgcttgtagtcccagctacctgtgaggctgaggtggggggattacttgagcccaggaattcgaggctgcagtgagctatgatcgcatcactgcactccagcctgggcaacagaacaagaccctgagtcaggaaaaaaaaaaaaaaaaaaagagccctggccagtggaatagttcatgcaaccacccaattctttctctctagcttttccaacaggtgtttctgctgcacgggattttgcaaatctctttgccaatgcttataatctttctgaaaggtgtaccctggcatctgctgcactgcgtggggtccctgtaccccctggagcgagcacagccttgtcatgggtgtctcttctctggcctttgaacaggaaggccaagagccagaggagctctgccctgcagcctctctccgtcctcacgtttgactgaaaaccaaccccagtcctacctttaatgagcagtagaagtcacagctgagagaatttcctctgtatgtgtgtgtgtatttttaggcatgcacatgtgtatttttaaggacataattgagtttatgtttaaggtttgaaaacccatttacaaaatggatcactggccagactcctcactagccgtgtctatgagagagtgcttgcccatccccgaggtagaagaacagcaccctgaggtgccgctgccccagccggcctggtgctgacaggctggaagaagtgagttgccctctgtagagacccccagagcagatgtgagaagacggccctagtgggagtgccatctgacaagggtcggggagctttttatggacaagggatgccactaaaaattagggatcctctgttttatcctggactgctagctccttttaaataataagtcttatcgagttctttttttttgaggcagagtttcactttatcatccatgctggagtgcagtggcgcaatctcggctcactgcaacctctgcctcctggattccagcgattctcctccctcagcctcctgagtagccgggactacaggtgcctgccaccacgcctggctaatttttgtatttttagtagagatggggtttcaccatgttggccagggtagtctcaaactcctgacctcaggtgatccgcccacctcagcctcccaaatttctgggattacaggcatgagcctctaggcccagccagagtttcattgagttttaatcaaagactgtcttgtgatctgtgattaatccagactaggattcagtaggcaaaagagcagagggccacaaggggagtaccttgtcactgtccatttctccccatcctccaaagcccaaggcacccactcatctactttgtgtccctatggatttgcctattctggacatttcctagaaatggaaccatatggtatgtggccattcgtgtctggcttctttcacttagagaatgtttgcagggttcatccctgttgcagcacacattagtactgcattccttttttagggctgcataatattctatcgtcctttgatgtttatttcagcattttctacacttgtacagcaaacacaaacacacaaatgacgcccctgacttctgtatctgcagtcatccttttccctcacatagctgcccagctttgcccctggtttctttctgatattgactcgatgtcacttcaccaacaccttccctggctaccttgttaacagtggcaaaccctgtcctatccttccctggttcccatttgtgcttcaaacctgttatcttctaacttactgtatgtaccacgtagttttcttatttatttcttatttatttgcccacctctcccttcataagaatgtgcaggatacactgctgtatcctcagtgcctgacacagtgccaggtccatggtagctactcaacacgtggttgttgaatggataaaagttgccggagcagaatatctaatcatttttgcgacccactgctaatttcacagactcctccttatgtctgtggatagtggcctcattgattgatgctttaagaacataactggggccaggtgcagtagctcatgcctgtaatcccaacactttgggaggctgaggtgggcggatcgcctgaagtcaggagtttgagaccagtctggccaacatagtgaaaccccgtctctactaaaaatacaaaaattagctgggcgtgctggcgcgcacctgtagtctgagctactcaggaggctgaggcaggagaattgcttaaacccaggaggcggaggttgcagtgagccaagatcaccccactgcaccacagcctgggcgacacagcaagactctgtctcaaaaaagaatataactcatccaaggaagggttgcagagagctccacgtagagagcaagatagttgggaggagaatggaggagagggactggctttttacagcttaggtttgctgatgaaaaaatgaaaagcataaaaattgctcccatctgggctctcctttgattttatttttgtccatagcaccaaaagaacacagagtaatgaggatatcttgagtgaattgctggagtactgcagacccttgaataattctggttaatctagacttctttgctttcttctaaggatctgttcagttgggaaaccctgcttgtcgacttctggtaacctctttgtcttggccagttttaacagcttgtttctgctgaaccagccaatacttaggaagctgtgtaaggctttttttccccctccttcttcttaatgagtttgattcagaggggaagcccaggctgaactgaccttccggaaaatgtaaacctgtttaacaccaaaccttacacagccagaacatgctgtgcccaactctgcctgcccgccttgggctgtgaatcggcacctgcaagtagggctcaagggtgttacagtcggggtcctacctgcctggggtcattcttgaccacctcaagcagacagaggcaatttctaggcaacatgatttgtaaagatctgacctctaggttgggagtaggcttccagtttgagaccatgagctgctggaatcgtagacttccccagttcaccttggaagagtagagttcagttctaacagagctgccagaaagaagggctacggctcctcggctgtggctcttaccattgtccctccttgagctgactctaactgccatttccctattatcgcatcccttgcagcttagaaatgtatttttaacaatatatctgggttcagccactggaggttcctcacatggtggaaatagcatggagtcgagcagacagaggagggctcaagtgtcacctcccaccatgtggcgtctgtgtgaccttgagaaagtgacttaacctctctgaacttcagttgtcataatagctaatatctcaaaaagctcttcattcattcattcactcactcaacagacaactattgagtgtctaatatgcccccaggtacatgctaggtgccaggaaaacatactcaaggaaatttgagtctggttgaggaagacattagagcataaaagccattacggcaccacatgatcattgctttggcagaggtatgtgtatgaatatctgggagaactggcccagaccagggctgggaattttgggaggcttgggatagccctggtgaaaagaaagttgtttaaggcaggctgcagagtagacacctcagcttcctcctctgcttccgcccctcctcttccccacaattcagtttccccaagtcaatctgcacactgcagaagtcctctgggggaaagagcagagctctaaataggaccagccctcctggaaagacagaaagtctagatctgaagtcctcacttctttctggaaggaaacctcgcagagcagataccaaattgctcccgcaagaggatccgtagagagaaaggccccagctgcagagaccgtggcccagccgcagccccctgcatgtctcgggtcaagcggagaagtcaggccctccaagtggaaagtccaggctggagcggggcaggcccaccgcctcctatctctgctggctgccgccacaattgcagagcagctggcgagaccgcaagcgttccttctcccagcagcagcctgacttgaaaagcaaaccacaaacccctggcctgatgcctgctcacccgcctcactccctggcaccttccaaccaggggagcctggagctcacgcgtgaagttgcagcagcaagcaatctgcctcgcttctggtgcccaccgaaaccaaggtctgccagacagcagcgctgggacctctcccctccccagcaggatgggccggctctggaagcacgaggtgttccaaagtgcaaacaagctgctgttaaataattattcccaaacgccaaagcccttgctggtttgcttgcttgcttttttctttttttgcctcacacagatatcgctagggcagagtattgacatttcgttttctttttgttatgggtgataaagcacggtgtttcttgtgagtgtatgcctgtatttccctgcagagctggttgccagtccattttcttctatcccatccccatcttccgtacagtccgatgacctccacagaggagatcgggatgtctctatgatgccacgtctctggatagagctggagcaggcataagagaaatgccaactgccaaccccccccgccacccctggaaaaaaaaaaaaaaaaacaagaacaacaggtttctccctaaagcctgtcctccaaagtagtcaaaccctgattaaaaaaaaaaaaaaaaaatttagccgggtgcgttggctcatgcctgtaattctagcactttaggaagctgaggcaggcagatcacttgaagtcaggagttcgagaccagcctggtcaacatggcgaaaccccatctctactaaaaatacaaaaattagccaggcatggtggcatatatctgtaatctcagctattcgggaggctgaggcaggagaatcgcttgaacccgggaagtagaggttgctctgaaccgagattatgcccctgcactccagcctgggcaacagagcaagactccatctcaaaaattaaaaaattttaagaaaaataactttacaccaatctggaaagagatgccttggccaaagcaggtgaaatggcctaccatcattttctccccagatgtaccaagtatttctcagattgattaattcccctttgaagcatcccactgaggtctgtcatagcaggtagaattagccttggctttttttcaaggaaagactggagcacagagaggttaagccacacatcactgggtcacagtgctcattgctagaaaaaccaaagctagacccagatattccaaatcactggacagcttcagccattcaacccactgaccccagccagtcccttggggcactctgaggagggaaggaattacatcagggggcagaggataggaaaggaaaaacaattccagcttctcttgaaagtatttacattcatcaaagctttatggtgaagtctttctgcaagaaaagccaaaatacacacaagaaaataatacagagagaggcctctagggagaaaattacaaggaaatcaagtccaatggagaaaaacaaaatggcctgcgtctcaatgggcttgtcaagtacttgttaacctctttctcccttttcccctagtaatgactcttaagccaaaggaagctaagaggtttttgatgggttaaaaagaggccatccattaaggggtcaaggcccggtgctctgggtatctgtcactgaatgaaccaaatcaatttagagctcgcgttgtctgacaatgaggaagacgcaattggccggaagaacatcttgattccattaggcctggctgcagagaagaattagccattgtctcctgtgctgggtgtgtggccatctctgaagaagatagatgcctctttcagtgcaagtgatggaggacatcctcagacccatttaggaagccagtgatctgccgtcattgtttgggtatttgggagggcctgatatgttcccattatagcccactctgttctgtgtaagactgagtcatcttacaatgggatacttttttcgcagggtgaatgttttgagattagaagtcataacaggaaaatggtcaaaactgactctggtcaagattgcagtggacggaggaattggccaataagactaggaataaacaaccccaaagagaatacagcaaactccagcacaaacgaatgaatggggaccctgggtccaacttctccttgcattgtaaacaatccaatttcacagaaaacagtttttgcaatgctcatgacaccatatgagttgtctttcaaaaaaacattacacaaacctgtactttgtgctgatatgtgttcaaagtattcataacttttatgttttacttgaacaataatattggtatgtaattgacggaggggaatgtgtacaatcatagcatttctttttttttttttttttttgaggggggagtctcactctgtcacccaggccagagggcagtgacacgtctctgctcactgcaacctccgcctcccgaattcaagcaattctgcttcctcagcctcctgaatagctgggattacagatgcatgccaccacgccttgctaatttttgtatctttagtagagactgggtttcaccatgttggccaggctggtctcaaactcctgacctcagatgatccacccatgtcagcctcccaaagtgctgggattacaggcaagagccactgactgcaccagtctcatattatttcttcagcactatgtaccaggcaccattttaagcatttaacatatattaattcattagtacagcagccctatgagaaaagtgctattattcctattatttcaaagatgaaaaaactaaggcacaaattcaattgctgagaatacacagccggtaagtggcagacagtatgacgttgaaaaccatgcttttaatccatgctattctatattgtctcccatcggtaggaaatgtttaactcaagctactttatttttaaattccaaagaattgcagcttgacattctctggatttacaatgctgaccttcaacccatgcacagaatgtaggaatgcccacacaccccctcgttttagagaggacgaagctaagatggagagggctctacaaagtcagagctagaactgagggctcctgacctcccacccagggttcttgctcctaaaaatgaaaaccaaaacaatcaagagtaaacaagagtcatgaatactgattatttgagacaaaagcatgagatatatgtgaatgaggcagcgcggcacttctaattttttttttaattttttatttttgagacggagtcttcctctgtcgcccaggctggagtgcagtggcatgatctccgctcactgcaacctctgcctcctgggttcaagtgattctcttgcctcagcctcccgaatagctgggactacaggcgtgagccaccacgcccagctaattttttgtatttttagtagagacagaggttcaccatgttggccaggctggtcttgaacttctgacctcacgatgggcccacctctgcctcccaaagtgctgggattacaggcgtgagccaccatgcccagcctgcagtgcggcacttctatagagtttgtaaagcctggtacagaaaccagagatggtttccatctctggctataggaatcatgggttcctgtagcatgaatacagctactttatgtatgtcttgtcttcccaagtagattgtaagctcgctacaaatataaacatgtattaggcaccatgtgtttcctcttgcctatgagaacagtccagtacaaagtagaagactactacatgaatggttggaaagggaatgggaattcaatgctgcctgaaacccaagggccttgcctctgtcttctttttttgtaaaaagtaaaatatattgaatgcctaaaaaaccgacagaaaaaaaaaaacctctgacatatgatttcaacccactaaaaacatatacctgggccaggatgttggctcacacctataatcctagcactttaggaagccaaggcgagtggatcacctgaggtcaggagttcgagaccagcctggccaacatgatgaaaccccgtctctactaaaaatacaaaaattaactgggcatgttggtgggagcctgtaatcccagctacttgggaggctgagacaagagaatcacttgaacccgggaggcagcagaggttgcattgagctgagaacgtgccactgcactccagcctggaggatagagtgagactgtgtctcaaaaaaaaagtatattttatatatatatatatatatatatatatatatatatatattttatatatgtatattttatatatatatatatatatattttatatatatgtatattttatatatgtatattattatgtatttatatatgtatattatatatgtatattacatatatgtatatattatatatgtgtgtatattacatatatgtatatattatatatgtatatatattacatatatgtatatattatatatgtatatatattacatatatgtatatatattatatatatgtgtatatatattacatatatgtatatatattatatatatgtgtatatatattacatatatgtatatatattatatatatgtgtatatatacctacttctgttgccccttagaaccggctgtgctccaatagcaaaaccttaccagggcacatgggatccagtcctctgagagcacaggtttggagctttctgggtgctctcacattttaaattccatctgattcgggttcagtgactcctttcttttgccctgcagccctctagatgtgaaacaactcatttgtatttgctgaaaatgtaaatccatctaaagatttgcaagtgccagtctgctctagaaagtaaaaagggcagaaatgaaataaggaagtgagtttttcagtttgtatgttttcttctgagcttggagattattcctgtccatgagtctaattcttcttatatagagactcagaacaagaagcttgaaacaactttgttctcgttcattgtcagagcttcatggtgtgttagaaagagcccaggaccagaagtcacaagatgtgggtcccatcatcaattacttatttaacctctgccaatccctcaacctctctctactggggttactttatctgtgcaaggaggaggtggaccagatggctgctgtgattctgtgtaatagcccccctggatgaaacaggaagttactcatagggagatcattaagaagcttggtgactcagcctcaggggcagcgggggaagacgaggttctccaaagtcctagtcaagcatcagagccactagactgagcttcctctcaagcgtctatttccacatcgtcctgggagcttgcccaccactccacatgcagtcccagctctccataaatgctggctggggaggaagtccagtggagccaaagccccttcctctgccccagccttcagctaaatacaggatgtgggaatccagcaggccatctaatagaaaccagtaactggtccctgctcattaagtacttagagtggaccctgttgcattcaggtctcaaaggcagtatttattacccacttttgtttgcactccgtggataagtgtttcccacctcctgttttcatacatgaagatactgaggcccagaacagggaagtggaggacctgtgatcgcattgggagtcacggcaagtctaggtcagaaactaagaatccacatccagtatcagccagtcccaacaacagggacagacatagtctcaaggaagccactacttggtggtttcctctaagttttgtttcacgcaagtccagatcatccaggctgttttttttgttgttgctctttttttttttttgaaatggagtctcactgtgttgcccaggctggagtgcagtggtaagatctcggctcactgcaacctccgtctcctgggtacaagcgattctcctgcctcagcctccggagtagttaggattacaggcgcgtgccactacacctggctaatttttagtagagataggatttcaccatgttgacaaggctggtctcgagctcctgacctcaagtgatcccccaaccttggcctcccaaagtgttgggattacaagcgtgagctaccatgcctggcccaggctgtccttcatcacagttgtcgttgtgttttagtctttggagtatggaaagcattgagtattgaaagctactgagtattgaagcattgctgtatagaaaactagaggaagccaggactccaaggatagaaggaaagaatacttgttatcatttaccgtataaaaggaaagccaggccatggtgcaggatgaaaaagatttgcttttttactttctacttacagtcatattgtagctcatttgtaaaaatcattccacttgtaaagttaaccatccattagtcagtaagagctgttcccactaattggtggactcctggggaaagcaacatagttagaggttagagtaatggaccaggtgcccttgacttctatttctggttccttcacttacttgctgtgtggccttaggcagttttccttaatttctctgggccttgtttcacccaagaagtaaatttcccacttgatcttcttgagggatgccaaaagatcaaaggaacgatgtttgcagggctttttaaagatgcttaagtgacgtgcactagaaaccccttgatttaataggtatgaattaatacattctttgattattggtagaactaagtattttagctttttaattagctccttggatataattggccataggcgttacacaaatccctaagggaaccggcccagtcatcctgatgatcattatgggtgcctgctgtgtttttatgcggagaggcagagtgtgttggcagctttacatggtggtgggttatgacggctgcactgagccagcgcaagctcgggaggctcccctgaggtggcgcagaccatcggggctgccccgaaaccagctcagtcagagcccaccttaccctgtttacaaaggggaggcaaggtggagcatctcctgtttgttgatttgattgttgtgtttgctctgccagcctcagagtgaggtatttaacaggcaggacttctaagcctcaagggcccatgggcagaaatgccccagaccccatgaagaaaatgatgcttttccagcaagctgcaccccggccctgggcaaggggcagctgcttccaccctcctggtccctactgccttcatattcctgctccctagctcaccccctccctcctaagtgaagagaagtcagatcaggctactgttctgacatgcacaccttctcttctgttcctgggacccttttgtttttgtgtttgttttaagaaggagtcttgctgtgtcgcccaggctggagtacagtggcatgatcctggctcactgcaacctctgcctcccgggttctagtgattctcttgtctcagcctcccaagtagctgggactacaggtgcccaccactacacccagctaaattttgtatttttcgcagagacggagttttgctatgttggcccaggctggtctcaagctcctgacctcaagtgatctgcccacctcagcctcccaaagtgctgggattccaggcatgagccaccatacccagcccattcctgggcccttctaatgtctcaacgcaacaatctgatcctgaaaaccacccatcccttcactttactcttacccttccttcccaggattgcatttgcaaaacaaaaattcatgcttaaagcaagcatcagggggaatccattgttctgcaccctgccacaaaaatgtctagtgcatcatcccggggataggcctgggagccgggactccatggttcgcagccaagggcagaagctggaggcagggccttcccacgggcagctacagcagccacagacggggccatgcagcagagtccagatggttttgttcgggctctttggcagacgcgcagttctccacgctgaactgcatcagggagcacttaaagcaaagcttggtttgtgttttattttgcatggaatgggggagacaggagttgccagggaaacaacccctcggagcattctgctctggggttcttcatcgggtggggaggggggcttcccatgaaaggcacaggggttttctcaagcgtgctcacacctggttctgctttctttccttctcttggagggcttgagggttccacctcccaggcctgcccattaggctggcaggcaccttaccccacagagcctgccagcaccagtacatgccaggacctaaggccaggatcaagtccacaatgagcagggcccagtgcaaaatggaaatgcagggccccttgatcaaacccattaggtgggttcagtgtacactgctcaggggatgggcacaccaaaatctcataaatcaccactaaggaactaattaaccaaataccgcctgttccccaaaaacctatggaaattaattttttaaaaagcgtatagcaacaagacaaaaaaaaagaataaagatataaagaaagaaaaaaaaacctgttaggaatttcaagatatcaacagcagagcaggaaatcaagccaaggaccttctgagcaaagggccctcaggtcgcacacccagaaggccgatcctgttcaagacttcactttgcctgagcaaggcgggtgcaggatagcggctgagggaccgccgtggtatgcagccaacaggaccctttcattgaagtaccatccacatcccttacgtgagaggaggggagaggcactgggagaaaaattctctgtatttaaggatttgcagcacacacatatttttttttttaaatccaaaactcagggcttgagttaggaaatctaagaaaagaatgattctggttgttctggagttactctcttttaatctgcaaggatttgggagaagtaagagcatttgggattcatagtaagatctaaggtcactttgtgccggtactgtgctacgatctgtggctgctgagatctaccttagaggggttatttttgccattttacagaggggaaaactgaggctaaaggaaatgctgtaacttgtgtcaggtccagcagcttagagcctgagttgggtgcggtggctcacgcctgtaatcccaaaattttgggaggccgaggcgggcagatcacttgagcccaggagttggagaccagcctgcccaacatggcaaaaccccatctctactaaaaaatacaaaaattatccaggtgtggtggcatagtcctgtaatcccagctacttggaaggttgaggcacaagaatcgcttgaacccgagaggcagaggttgcagtgagccgagatcgtgacactgcactccagcctgggggacacagtgagagtctgtctcagaaaaaaaaagtagtggagcttggattcaaacagatgtagtcagaccacaaagcctgcctgcctgaccgctttgctcagtgtactgcccccaggctatgaggccaatgtcgtggaacctgttcattctggtatttttgtagctctggctaagttcaggtggaatgtcgctgaatatataatacctggggaccagagaggaaatttgggtgttttaatggaaggatttatagtggccaagcatcagacaggaccatgagacctgggtctgtgtattttagtaatagactccgctaaggcgctgttgaatctctgacacaaagctgtcagccaacatagagctttgagccatttgctttccttgcagtgtctctccacccacctggagttgatgcttaacaagaaagaaaaatacaatttccttgggcttcagagtgaaatgcactctgagccggggacaaaagaggcaactctgtaataagagataatagatattctccttcccagtacttaacgcagacaaaataattgtaaaattccagagagcagattgtgaggataaaagaatgtggccattccagaagcagtttttattccagcccagttttatatggggtgctaggtccactagccaaccattgactagcagtgtccccagcctgggaagacagggtgggtcagatacaggaaatggccatcacgtctctaaggtgggcagaacatgagcaggtcagagagggtcaggagcctgaggtccgaggactctggggtaagaccctgaaaagcatttaactcagtggccagagaaaggggggagcccagggaagctgttccccgcagaaagacaagaacaagattcctactttaccccttctttccgcaaaataaaccgaaattcccagtatgtggaaggtgatgcagtaaccagcaaatattaatgcaaatgtgtgtgcacacaagttgaacctcctgtgatatttcccagagggttaaagtaactttctttttcatccaatgaaaggaaccccgttcctggagcaattggatgcagccctaattacttccaaacattacagtcagcttctcagttaacgagctcactggtccgaaggaggaatgaccgccagggccccttcattccacttctcaccctccctggccaagcttgagggagagactctggccgcagcgtccttccgggcgacagaactcttggttttctttgtgctgcagcaagaagaatgggcttgacaggctcacactgtgatcttgagttgcctgcccccgaaataaggtcccagcctcctccgccctttgcaaggctcttacacattagtgagcaggaagtggagtcccgatgggaggctgggaatttgaacgccttcccatttcagcactggaggggaggaagctcagttcagcactccacgcagatggctaccgctccctcctgagcgctcgctcctctcgctcctctcccctcacccgccgccttccctgctgggtccctctccccggtctccacctctcctccctctcctggaagggaaaagtctgccaagctggggactgccacgaccaaaccaacaaaggccgaccgaaggcggagaacttgaaaagaacttgttttgttccagttaaggaacctgcaggaaaatccacacccacattgcctggttttgaactggagagctgcgtgtgtgtgtgtatgtgtgtgtgtgtgtcaagcaagaggcggaggaggcacagactacggtctctgttttgataaggaaactgccagctgtcgaaagttaaccagcagagaggggaagatggcccaggagccagcccctcctgagttttaaactacactgttttctgtccagatattccaatggagacagttggaaaacctgtacttcagagaaaagaagttttccgtggaagttcatgacccacgcaggtaagcttgaaaagtccttttcttgcgggatggcgtggctctcggccgggcgtgttatggatattattttggggctgtcgttgttcatggtcagtttggagcagggagcgagggtgggggctcctggggaatggagctcaaatcagacagtgaaactttcttttcaattacatgtgttgataaatgcagtgggttcgcacgtgtgtgtaagtagcaatcccctgactgtctcatctggccacatgtgtccctggctcgtgtgtgtgtgtgtgtgtgtgtgtgtgtgtgtgtcagtgtatgtgtttgtcttacctgccggggcactggaaggaagctttatagcactttgtaacacacaccagtaagtccccataggaaacttttgctatagaagagtctgaagaatccctcattagagcttctaaaagtatttcaggcaggacggtcaatgcgaaaatgaatttgtcaccaaagcagttgtgctacgttgttttattccaggagctgtaattttaggatgttagtattgtgggtggatgtgaaagaaatgaaattatttttccctccacccaaaatcgtaccccagagagcaccagggttgtaaaaagtccctgtactcttaagtcagatgcaagacagtggggccccaggttggaatgcagggagccccaggtggctggggtctgggcagctcatacccactgttttcctctctttgtctgccgctggacctaaagttatatgcatccccaaaaacagcagcgtaattccctaaaaccaggcctgacaactaagaaatcactttccataaggtcagagacatttacaataagaaggtagccccagggagacagaaaaaagatcagactctacagaggagcaaaagtgggttttaggcgctgttgacgctccagccctgggcttagaaggaggacttggcaccaattccagctcacacatggcttctgatgctcaaaacaagctgcagtccctccccatgagctctggacaggagggagatttggagttaccccgcccagtgagagggcttggacctgtgcagtagcccctgttcctgcagcccatgataacccggtaggaatgaagccgtgcttgccctccagggtaatctgcctgaaacagccactcctgtgtagggcaagagcttatctcagcaccacggttactacaggaatagttagtggagagcagctgagagtttctgcatctccacagtcaggtgaaaatggtagcctttaacagaaaaatattttatccggtgtttctcagggccctgcaaggggtttcgcggccagaagccccactccatggagcacagatccatctgtgcaggccaagtggggtgggcggggagatttcaaaaataagattccagccaagaagaaactcactgttcattttccaggtgaactgaattggaccaggttcttaggcatgtaagagaggggaaatttaagtacagaaagagtgaaatgaactttgccacaatgggtcagatgcagaaaggggatgctccataggataaaaatgaggggctgggtaatctaaggggctgagcgcagggaatagaccctccgccatgcctgtgctctgctgggaattcagtgaacacccaggcaccttggacaaatcctttaaccacgcacgcatatatctgcacatgtgtgttcgtgttctctgtgcgtctgtcgccctattggtgagtactgctaaactctctttaccaaagcccagggatataggaaagaatctagatctcacacgtgactattcagtgggcctgtcgcctattagacagcagtgatcaatgtcatgtttcttgcgaagcttctgtgtccttgtcgggtgctgtggcagggaaggaaggaagtcggaggcagggtcttcttccttaaagatcttctagtgtaactgagaagacaggcagaagaaggaacttttattttgagacacggtctcattctgtcgcccatgctggaatgcagtggtgcaatcatagctcactgcagcctccaccttccaggctcaagcaattctcccacctcagcctcagcctcccgagtagctgggactataggtacacaccaccgtacccagcttttttttttttttggagagactgggtctcacagtgttgcccaggctggtctcaaattcccaagctcaagcaatcctcccatcttggcctctcaaagtgctgggattacaggcgtgagccactgcctggaacctggctgagaagaaggaactcatggagtgtcacaagaaacaaagaaacctgctctagacgacaagtagctagtatacaggagaggcaggatttgaacctaggaggtctggctccagagctcatgccctttatctctatactgtacagaagggccagacgtcgtgggccatgaagggtgaaggacagggtcaccagaggcctggctggtcaggaagggagaggcttaccaggaaggagaggtctgagttggacctggaggggtaactaggattaaagccacgtggtagggcctcagggggatatagatgtcaggtgggggcttctcaattaggataaacaaatgagggagggtctggttggagggaagtgggagttggaggagcccagaggaagaagcagagctgtctcgtcccaggcaaactcgctctgagtacactgagttagcctgcagacaggcaggaatgggggagaggcccagggaggccagaggtggagacccgggatgacttcagcattaaagacacacaaggaaaggaaatggcttcaggtcagttatttagcatggcagagccagagctatgagctgtaagatctttcttgcactcagttctctttttcacatcctagtggtgccttttttctcttgtattgagagttactatttcacgtattcatgagccacgtgtgagtgcgttacatgcatagaacatggaatgatcaaggcagggtacgtggggtatccatggccttgagtgtttttttgtttgtttgtttgttttgttttttgagacagagtctcactttgtccccaggctggaatgcagtggcgccatctcggctcactgcaccctccaccttccaggttcaagcaattctcctgcctcagcctcccaagtagctgggactacaggcgtgcgccactacacccagctaatttttttatttttagtagagatgggatttcatcacgttggccaggatggtctcaatctcttgacctcgtgatccacccgcctcagtgtttactatttttatgttggtatcattgcaagtcctctcttccagttactttgaagtgaacctcgcggtgctttttaagttgaatgtgtcatcctattgcttgtggccttgcttatttgaggtagggaagaggaatgtgattggcctcacgttagtttggtgttccgggctcagcccctcccccaagccaggaaggcagtcagaactgcagtaataagatgggcagcgccagatacggtcatttaatgaagatgtaatcgatgggaatgattcagggcagaggctgctttctgggccgatgggctcaggtgtgattgcaccattccctgtggggcactggacaacactgtgcactttctccccctgggcatcctaactcaatgcttagcttcatttctgagcttctccaggctgggccaatatttcacttctacggtttgggtaaaataggaagggcttgaagcgaaagatgaggagaggagataaagtaatgatagagcaggagaagaactctgagtatctgatttagatgctccggggaactacccggacctgaccagccacttacctcttctgccctcccggtacctgagaaatggaggtacctagcgttgcaccacctttcaagatactgttcttgtctaattcagcttttctggggggaaaaaaaagtcattcatttatttccaagagcaagaactgctatggaagccaagctgggagcacagatccctgttttcttttaaatttagagagactggcgagggatctccccctcgctctctccctggctccttttttcaattattttcaactgtgtgctctttcacgctctggctttttttttttttttttccttcacttttgttggaaccgaagggagaaaaaacctgtgtggactcagtaacattaaccaccagatctgaatttctccttaaaagtgagggtgaacaagactccactttaaatctttagcacccccgacccccgcccaaagtaagatattgctggcagctttgttttctttaagggaaaattagccatgaaaaaaaatgttattgtttgtaagtcctgattacccccaggtttcttccaaattagatatgttagtcttgagaacatacattttgtttctgatgtccatgtaaaatgccccaaatcccagcccaccttcctgtcaacttgtctcacatgcatgcgcacacacacacacacacacacacacatgcaaacacacattcttagatttcatttgcaaaataatctgcctatcctataaaatatacttcactaagagcatgaccatataactccccctaactccatgaatgtggagatgaacagttcccgttttcacttttaaagtctgattactccatgtagatttaaaaatgtatagacagggccaggtgcggtggctcatgcctgtaatccgagcactttgggaggccgaggcaggtggatcacctgaggccgggagttagagaccagcctgatgaaaccctgtctctactaaaaatacaaaaaagtagcccggagtggtggggggcatctgtcatcccagctacttagaaggctgaagcaggagaattggttgaacctgggaggtggaggttgcagtgagctgagatcttgccagcacgctccagcctgggtgacagggcaagactccatctgaaaaatataaataaaatgtatagacagacgttgggggaattggggctgggcacatttctctctgcctttcttctcctgattctttataccctccctgccctctgaatagattggaaattgatcaccaaatcttcaaggaacattgggttagttatataagaagtcccaattccctgggacgctgtagcctgtggtgattagaaaataatttactcatccccaccgtaggcacatttcctgtctcatagggagcatcattgaaggttttcctgtctgcgaagtttgtcttggcccagtgccaagtccaggatcgaaaaaggaccatccattgacctagaatgacccatcttatcccagacaaggccgaggcttggccagattctgaactctagggagtcagaaaatcagaaggtggcctttgcccagccaatgatgtctgtaaggtgtgtgcgcatgtgtgtgtgtgtacgcctaggtgtatgtgagagctcatctatcatctttacgccagggcttctaggacgcagtgggttctctacagaagctgttgactgagaaatggtttctctcaatagaaatgggattgaaccttgtgattcttgcttccccagggcttcagtgacaaggaggacgtttgggcacagcggcattgcagtgcacacgtggtatgcatgtccggcattgatcaagtccatctgggctatggccataagccaacaccagttctatctggacagaaagcagagtaaggtgagtgaccagacctctcaccaagcccgggccattgtctgcctctcttagtttaggaatgaggatcggatgggtgggggaggcgccatgtcccttgcccgggtccataccttgcacagatacaggcttgcctcttagggctacagatgggagggatgagactagctcttcaagagggcacattccatgcatcttggtccagggggctctgaccaccatcagagccgctcaagccgctgactgcagccaggtaggccccttttgaggaattcccactgtgcttttggccctcgggagaatcctctagcagcgtgaaggcaagccctttttggtgtttaaacagtggtatactatcttccttttgaaaagaaaaaaggaatctttctcaacgaatagacaccacctaactgtttagggtaattgctgtgaaaaccctcaggcggttccaactgccaactccattttttttttttaatgcaaaactggaaacgttaaaaaaaaaaaaaaaaaaaaaaaaagcaactaccctgtttccctaaggtagacctagagcctggggccttggtaaacagacttcctccaaggagatgtcaccacccctgactctgggcacgcagctgcgttttctggtgggtgagaggatgacgtctccttggttcacacagggcttatatcaacactctgccccctcttcctccagccctgtctccccagactcccctgtcagccccccacaagccactcccattcattctccctcaggggaagagccctgccaagatggccctgcagcttctctcaagatcctgctggcttgggctgggggaatacagactgaggtcaccctgggcccctgggctagtggtttctagcacttacggaggatttccctccatcgcgtgagttcttgggagaaggtggcaagatgctcaacttactgggcacaagagtcactgaatcggtgccctctagggttctttctcttttgccatcttatccatattttaaggggtttctctttttctggggaagaggagagtgagcgaattgggggtcaagggggaggtgataagagaaagaaaagaggacagggctgggcacagtggctcacatctgtagtctcagcgcttcgggaggccaaggcaggaggatcacttgagctcaggaattccagaccagcctgggcaacatagtgagacccccatctctactaaaagaaaaaaaaaagaagaaaagaggacaggaagaaatgaaacaatccctttagtcataattcagttttaaattggggtctgtcccccacagccgtcattttatcctttgtaaaatatcttgtcctctactttctgaccccctttttggtcattttctgggatgaatgagcgcaggacagagaatttctgttgttaggaataatgacagtattctccgcagctctcctggcagtgatgggtcctagtcctagcgcaggaatttgaagctcgattagatcaaaagaaatggggccaaagtgtttttgactcatgctcgatattgacacagtgggtgggtgtcagggttttgctgtccaggggcaacagttggaggtcgacacctgagaacgttaatttcaccctctgtggttgggtgatggatggtgggggttaggggattgggcaatgctcctgaaccccactgccagttccccttgacggcagaccccccacgcactgtaccacagtgtggacagaggaaaaggtgtatctcgccctgaggatagcacagcattggctgttcaagctcctcctctctgcgccggtttttgcataggcggtctcttgagcatttcaagaaacttgttcttatggctttcctgctgcacccgggaagatgggctcattctgcagttggcaagccttgttgttgaacaggctaacaggtcaactcactgacacagcaagtatatctcaaaaggaaattattggccggccgccatggctcacgcctgtaatctcagtactttgggaagccgaggagagcagatcacttgaggtcaggagttcgagaccagcctggcaaacatggggaaacccagtctttactaaaaatacaaaaaaaaaaaaaaaaaaaaaaaacaataaccaagcatcgtggcaggcatctgtaatctcagctactagggaggctgagggaggagaattgcttgaacccaggaggcagaggttgcagtgagctgagatcacaccactgcactccagcgtggttgacagagtgagactccatctcagaaaaaaaaaaaaaaaaagattattgtagataaattagcaacaagacgtgtcttttaggaggtaaaaccaaatgccccatagcattaggaatgtttcagctgtcccttttgtaaaagtaacccttggggactgaagaaaatgcccacgctcccagaaggagaaggagaacatttcccaggaagcctggcatgctcacagatgtcctagagccctcacacttctcacaggaaccagttccccagcctgcagtgacaggtgaggatcacaaccctctatgtgggaattggaggcctctgttttccagctctgggaccccgggtgggtctttcatccttggtgttttgctttccccaattagcagcaaaggaaattcctgacctcaattagtgattggtcagatggcaccacgtttgtgaaattgcttgaggaaatacgtgccatcttttactaatgtcatagttaatctagcatactatcactggccaacacttgcatgaagtttaaattctctaaaaggcccgcaaattaaatcagagatgatgacgtaccctttgggaattacattacaacacctttctgtttctggaatgttctttatagaacagcgatgtgattgatctctgatgggcagcacggcctctgggtgagtgatggccgacagggctgggacagagagcttcataacatttctaggcagccagttctggctggtatcctggccactgctcacactctactgtactgggacatgccaaccattcctttctctgaagagcttcagcaaagcccaggcctcccaaatgatgtttatcaaccctagagagacaagtgaggtctagtggttcgagtcagcaagggtggggagccatgagggttcaggtgctcccctgacactcgggttttttcttctttcagggtcactgtgcaaatcatttaaggaaatctctccttctttctctctgcctgtctctccctccctccctccatcagctctccatgcatatacatcaagaaaccattctaccatctaagacagggcggagggaggctgtgctggttggttatttgtagctccttcagaatgagaagctgcacaggcaccaattataattggtaacttctatgctgaccccagagatcagaaacgttgtctgctagatcccagcagcctctgaagcccagagccaaggaacgtcttagagactttgcaggaaaatatttgaaagttcaaaatgtttagagtcgacattagacacttttccctctgaactcagagtggggacttcttgaattggcccccaatccaaacgtctttccttcttcctaatctttttttttctctccctgatgcagttcaccattttatttagagtcaaaggcagagtcaaagggggacagggacattgaagctttgttcccacaatatcagacagaagactgagtcacgtgtatcagccaagactcccagaccaaaatgttccagagtctggggactccttaaggtcagcccagagacctgactttgcaaagagagactctccccgacaatgcccatgtcctcccggtcctctccccaccgagtctgttaggtcgctgtgatattttccattctagaaagaatccggaccgggcgcagtggctcatgcctgtaatcccagcactttgggaggctgagtcgggcagatcacctaagatcaggggtttgacaccagcctggccaacatggcaaaaccccgtatctactaaaaatagccaggcgtggtggaccacatgtgtggtcccagctactcaggaggctgagggaggagaatcgcttgaacccaggaggcagaggttgcagtgagctgagatcgtgccaccgcactcccccagcctaggcaacagtgtgaaactctgtctcaaaaaaaaaaaaaaaaaaatccagtagtttgctaaagcttccataaggcttccaggaatctagtctcctttaggaaggatgccttttgatctcatatttttgttttaagaatgatgtgtggcaagagttctggtatgacaagggggataagtttttcatgtgattaatgaggtccccaaaatatctggttgggccatcaatctaacctcagttagcaaattacagccaggccctaatgcagatcctattcttattacgatggcctttacataaattatctactttagttatcacaactctgggatgtgggttttaagacctccattttacaaacatgtatctgagaatcaggaaggtgaagggtcaaagtccgatagtgattcactgggaagagccaagattctaattcaggtctttttttttagacagtctcactctagcacccagcctggaatgagatcaggcagtggcgtgatctcagctcactgcaacctccgcctcccgggttcaagcaattctcctgcctcagcctccagagtaactgggactacaggcgtgtgccatcacacaagtctaatttttgtatttttagtagagacagggttttgccatgttagccaggctgttctcaaatacctggcctcaagtgatccacccacctcggcctcccaaagtgctgggatggacaggcttgagccaccatgcccagctctaattcaggtcattctgacttcagagcccagacccttcacccagcactgaattggtctaggccttcgtgagttattgttacatcaccgtttgggagtgggctactttttattaaaacctgggtctccataacagagcgatgtagaaagaaaggaagtcatgggttgtactcgccatgcttgcttagagggtaaaactcaaccagatgggcgcaaatgataggctgtgtcaaaatgaaataaaaagcccttttccttccttctgcggcaagccaaaatccttcgagggcctggcagccaggattgttttatgaacaaggaaattcgcctgaggaagtcgacttcagtctgaatgcaaggaaaaaagttgaggttagcaaggaagcataagtcgaggaaaggcccacggggtagggaggaggaggaggaggaagacagttcacaccaggtgaagaaaacaagcgccatgcctcagtgtttcctccagcctgcagacttccatcgtgttaacatgaggtcggaagtcgctgtccttgccagtgtggacagcaacgtcgagggcagaggaagggcagagctgcaggcattcagacagccctggctggacagtaagggcccccgggcacggaaggtaggctgtacacggggcatccaggagtggtgggtccacacccctccatggccttcaccaccacccccatgcctgctttctcctgtgtgggaaagaccttgggttccacaggccaggcaggaagctacaatggtgaacctcgcccagtccgtgtgtgtgctgtagacagtggccacagaaaggacagatgagcaagtgaccgtttctagttgttttcacgaagttctgtgtactggcaaagcctgttgccttcagcacactcacaaaaagttgatttcctgaagaagaaaacaagcaaacattggacacacgtgtgggaaatgcaaacaaacacattgtcactaccgaaggtagaaactggagcagataccttataaaaaccactgctttagccaggcgcggtggctcacgcctgtaatcccagcactttgggaggctgcagcgggcggatcacctgaggtcaggagtttgagaccagcctggccaacatggcaaaaccccgtctctactaaaaatataaaaattagctgggcgtggtggtggacacctgtaatccccactactcaggaggctaaggcaggaaaaccacttcaacccaggaggcagaggttgcagagagtcaagactgggccactgcactccagcctgggtgactgagactctgtctcaaaaaaaaaaaaaatttttttttgaaaaaccgctgcttttaggaatgtcaatgtgaacatagagttttttctaattattcttacctgctgtgacttttaaccaaatagagccagtcaacgtggattaaagggattatcctttgaaccataataggaagactagggcaacatgtacttaggtatcaaaataagcaaagcaccgtgtcagacgttcattggtgggaccccagaatccaaatgagcagtttttccacaatcatgcaccctgtgattgcaggtctagagatctgtcattgtcatttctctctttttttttttaagagacagggtctcactttgttgcccaggctggggtgcaatggtgcaatcacagctcactgcagcctccaactcctgggctcaagcaatcctcttgtctcagcctccccagtagctgggactacaggcatgcactaccacacctggctaatttttttgtatagatgggatcttgctatgatgcccaagctggagaaccactgtcacttctccatcagctaaactttccatgaccacatggcaaactatttaagaggtttaaatctcttaggtctttcacagcactgaaaatcattttctcctccttgtttaagcactaaataattataaccacagtgtttgttgagagctgtgtgccaggcagataaggaggaagaggggaggacaggggagttgggaggggaggaacacccttcccacactttctctcctttgacccgaaccaacccctgggtggtgagtggcatctaccctgttttgtggctgggaataataaagctcaatgagattaagtcacttttcctaaatcaggacattctcttaagcacaaagcagtgcagcctacagaatcggaggcttagaacatcctcaattgatgcagctcttgagctgcctctgctcttcgcagagagtttcggtgattaatgatgaggccaagggatgcaaacaaaaatgctgcacattagtcagggagataagtccctttgcggaatgtcaagacggtgagcaggcgcgggcgagggatgactgtcctttccgcaaggtgagcgtcacttctttgacctgcttccctttccattccagtccaaaatccatgcagcacgcagcctgagtgagatcgccatcgacctgaccgagacggggacgctgaagacctcgaagctggccaacatgggtagcaaggggaagatcatcagcggcagcagcggcagcctgctgtcttcaggtaggcagaggccagctggagggacgccccctgagcatggctgggaccccagaggggacccaggaaggtggggagagctgcagctggggagactgcagggcaagctgctccaaagctggctttgctttccagaccaaggttgggatccaaatgcgaatctgagaaaactgctcccaggaatcaaatagtggaagggaaaaaaaaaaaaaaaagcatcagtagaaccacgcagtgcaagaaggcctgctggtcacacttaagtgtcttcaggtaccccccagagcgtttcacaatgcccatggcaagctgtcgggaatgtcaggtccaagggtgaaaagtggaatccgctcatgtgcccacttgtgtgttgtgaatttcaggatctggtgccaggagacactgcattctactcccaggtgggtttctccggcttttaaaaatgcggaatactctctccatcgtgtcgcagggcatgatttctccattcagtgccttctgaaattgcgagtcagagatctggttccgtcgtccgcttccgccagccttggccaagtcattttgtcttttgatgttgggagggacagaggagttccaaggtcctggatctgactgacttaaaaaggggggtgtcatttactgaaatggcaggaggaggagtgggtttgaaagaagcagagaggaagggaggcagccgtggtttggaaatgttagaaaagggcattgtggccgggcacggtggctcacacctctaatcccagcactgtgggaggccgaggctggagaatcacttgaggccagggagtttaagaccagcctgggcaatataatgagaccccgtctctaccaaaaaaaaaaaaaaaaaaattagccaggtgtggtggcacagcacctgtagtcccagctacttgggaggctgagtagggaggatcactgaaccctggaggttgaggctgcagtgagcagtgactgcactgccctccaacctgggtgacagagcaagaccctgtctcaaaaaacaaaaaaagaaaagtggaatatgagaaaaaaacctgattgatgtaggaaccatgcagctgtctctgagccacgcaaagaaggcaagaaatcttccctggtaatttatgttactatatatagtggctgtaaacaataacaaaaaggaaaagacaggagaggaagaggagctaaaaattgtctcgttagcttgtgggctggtgtgatccaatcatagccaggagaaatttaaaggaccagagagaggacagacatccttcctggactgagaggcgaggttactgttctggtgagtggagcgttaagttgaaggcccctccttggacaggctgaggccctccggggaccttagcagtgtgttcacacggtcatgtgtttttataaaatctgtgaacataatatgttttgtatttttcttcagtagaaccgctaaaggccagtgtggtggctcaggcctgtaatctcagcactttgggaggccgaggcaggtggatcacctgaggtctggagttggagaccagtctggccaacacagtgaaaccccatctctactaaaaatacaaaaattagccgagtgtggtggtgcacacctataatcccactacttgggaggctgaggcaggagaatcacttgaactcaggaggcagaggttgcagtgagcagagatcgtgccagtgcactccagcctgggcaacagagcaagactctgtctcaaaaaaaaaaaaaaaaaaaaaaagccgctaaaattttataagcttcaagccccataaacctagatctgcctctgccacatcacctggggtccattgtcaacccctccctgccttaagttcttcgaaaatatttcatccaaaaaaatggggtcaatgctcattctttctgaagcttgggagttggccatgaagactgcagagaatgttgtcttcaaggatcaaagagaatgaaattcaaagaccaagacccctacctcgaattacagccgctcccagtctcctgctgaatgacctagagcagagtcagagccaacaccttgtttgtgttttaaacacaacctacaatcgcgttttttcctaaccctgtgaaaacccagtgtcagatgagagaggctgcatctatcagcccaccttcccccttagcacagggaatctggctgacttcagcttggattcttgaagctcagtggttctcaaacttcggcgtgcatcgaaaccacttggagggcttgtcaaaacccctctcagagctcctgattctgtaggtctggggagagcctgagaatttacacctctaacaagtttccgagtgaggctgatgctgctggtctagtcgctttaattggggagactctcttgttgctgaggaagagacaagcttggggtgggtgtgttgcccaggctcatagaacccaggtgtgcccagttttaagcccgtgtcctggtccatctgcacgggcccccttgtatctggcagactccagggggcaccaaggcagcaatttaccttaatagcagctatagatgaggctgtgaacaggagccccaaacctcctgagatgaaattgacatcatgcaccatcagaaatgaaatctggccgggcgcagtggctcacgcctgtaatcccagcactttgggaggccaaggcaggcggatcgcttgaggccaggagttagagaccagcctggctaacgtggtgaaagcccatctctactaaaaatacaaaacttagccaggcatggtggtgcacacctgtaatcccagttattttcgaggctgaggcaggagaatcacttgaactcaggaggcggaggttgcagtgagctaagatgatgctactgtactccagcctgagcggcagagtgagactgtgtctctctcacacacacacacaaatgaaatccaagtgtctttaagacttaaaagcagtacatctctatgactccccacaggctggactttgctaatcaatctggtgggctagaagagaaatcctaagaaaaccttcctgcttaatccatctgtacacctaatagataagcatcggtataccaatacaatgaagcgatcttcaaatgctttatcattcagcgctggggccccaggctgaggtgattaggagttagtagtagcagctggggccacttgcagagcggctcccattgtcagcttcagtgccctcagccctttctgcagctgcacagctgagcaagaagaaaccctggtgagaaggtgagaaagccccatgactcaacccgagggcaggtcccactcttaccagccctgcaagtttgagcctgaaaaacatcctttagtgccagggtggaggctccttggggtgccccacacccacctcctgtgacttaggagggccaagacagtggggggacgcactgcaaacaggaaacattccatcagggaacaaagggaatttctagcacccctagatcttgttctccctcccgctgggatggctgacggctgcctgtgtttccttgcaccaggaggataaagctttcccgtgatgaaagcattggcagcgccatctggaaggggctgattccacatcccttgcaatggggaaatctagccttggcctgaagatctaggcggctggctcatctccatccctttcttcctgcctttctgccctcttgcctagaatgtgttcccacaaaggggacaagccccgctgcttgcaattccaggagagctctaattgttaatactcttattacacttgccggattttattttctgatgttcattcagaaaaggtgatatgtataacccagtgtccagttgggtcaactgttttctctctttcacctccttgttagatagtgtctaataattgttccttaaaagcattttgagaaactagtctccatttcagaattttctaatacttgcccagtacccaacacccaataggtgtttgatgcacagttattgaaattgaattaaattgtgaaggatactaataagactcctgcatgtgctgtgttttaggaatattcaccccagcacagtggctcacgcctattcaggagggtaggggtttggggcggtggggaggatcacttgaagccaggagttccagaccagccttggcaacatagcaagacaccatctgtaccaaaaaaaaaaaaatcttcttaatatagctggacatggtggtgcatgcttatatttcccactacttgggaggctgaggctggaggatcacgtgagcccaggagttcaaggctgtagtgagctatgatggtatcactatactaacagcctaggtgacagagtgagaccctgtctcttaaaaaaaaaaaaaaaaaagaatcttctaatcttctatgttcctagagtgtatggtaccctgggccttgctgatacctcccataggatctgtctccagtactttttttcccaaattatattgtaagcctttgtcacactggtatgagacctttaaagtttgtgtcacgtcagtgtcctgcagtagtatccatcttgtcatctttcaattattctctgaccctcatctaaacccaaatcatggtgtgtctgagccatgtcacaacactgtaagatttctgtggtataaacatttctgctagctcccaactctgccaggtactatacacagcattttacaaagttatagccctccccccccccccccccccccccgcaaagagtttgtgtactgctcattgatttaaaaaaaagacgtaaaatgtttctaaactattagtaactttgaaggtggtttgcctgtttaaggacacataattacctttaaaactactgaagtctagtacttggtatctgaggcctcagatgctgaagaaatgaagaatgtcattgatacctattaaagaagccaggccaggtgcaatggctcaggcctgtaatcccagcactttgggaggccaaggcaggcaggagttcgagactagcctggccaacatgatgaaatccggtctctaccaaaaatataaaaattagctaggcgtgtaattacacacccataatcccagatacttgggaggctgaggcaggagagttacttgagcctagctaggaggcagaggttgcagtgagctgaaattacaccactgcattccagcctgtgagacagagcgagactctgtctctaaaataagtaaataaataaaaaagaagtcaatatccatacctaccaatgccctgagccacggattagcatttcaaataaaaaagtcaacatagttgactgtagattttgcttcatttttattttttaaacccaagatccgtcaccagattcttttttttaatagtaaattttttaatttttttattattatactttaagttttagggtacatgtgcacaaggtgcaggtttgttacacacgtatacatgtgccatgttggtgtgctgcaccgattaactcgtcatttagcattaggtatatctcctaatgctatccctccccctgtcccccaccccacaacagtccccagtgtgtgatgttccccttcctgtgtccatgtgttctcattcttcaattcccacctatgagtgagaacatgcggtgtttggttttttgtgcttgctatagtttgccgagaatgatggtttccagtttcatccatgtccctacaaaggacatgaactcatcattttttatggctgcatagtattccatggtgtatatgtgccgcattttcttaatccagtctatcgttgttggacatttaggttggttccaagtctttgctatgctgtcaccagattcttgacagtcctgctcatcacactgcagatgactcaatggcagatgatttcagcgtagttaaagtgattggttaaggcttgagatcagggccctgaatcccgtagtagtgatacgcagagctgtcccctgtgagaccccgtagacctgtatttaagtggaggcccttagaggtggtgaaccatctgaatcagagctgtaagcctgtgttggaagaaaaggaatgaaattctcacctccccatgcagcactgagtggcattcagatgggaggaaagtcgtggaacccgcgtcctgaatccatttgtgcaggtgctcagtgcctctgttattgaccactggagggggagcaggcagggtgcattggattcactctgccctgtgacagcccagtgattgcttccacatttgtagctgcgtctctctgttgctttcactcctaagtcttcaggtaacacatttgcagaaagttcaggtacagtttgagagaacaactatgaattcaaaccatctggttaagacatgttcagggtcttttaaaaaaagaatccaaaatccatgttgaaagaacttgaatgggtttattccttccttcccatctcatgttacttgaaattccagaaaatgttggaggggagaaaaaagggaataacaacaacaaagcaacaataactgggtgtatctttgtaggtgaagacacacagcccattcatagcttgtctgaaagtgagacagagcctgagatttgttctaagtgttgttttggggatttgccatcagagaacagctcattcattcattcattttgttttttgagatggagtcttgctctgtcgcccaggctggagtgcagtggcatgatctcggctcactgcaacctcttcctcccgggttatctgcgattctcctgcctcagcctcctgagcagctgggactacagttgcccaccaccacatttggctaattaatttttgtatttttagtagagatggggtttcatgatgttggccaggatggtctcgaactcttgagctcaagtgagctgcctgcctcggcctcccaacatgctgggattacaggcttgagccaccacacctggccaagccatcagagaacagttctgatttcaatgggagttaggagagttagtttttgttctcaggctttttaaggaaaatagcacaaacccacttaggaaatacccagtgtgctgcagggacgtgtggcttgttgtattaaccactgaaacgaataaatgggactgcagcatttcttaaatgagatgatgaggctgatcttggcttctcgactagaagtctagggccataaacgacccattctctgtaaaactaagggatatgttgtgttttcaagtaggaatttggctgtgtgattactgagatggccattgagtcatctgcagtgtgatcagcaagattgcgaagaatctggtgatggatcttgggtttaaaaaacgagaaatgaaacaaaacttgcagtctgtcattgtaccctggctctgacactttctgttctgggagaaaacaggttgtgctaaacatgggcctggcattgcctgggatccgtccacattcagtcctcagctgttgacacactcccattctctgaatgctagcacttcctcccattgttaaggagtttattaataactaatgtaacaatgagagtgccagctatctgacatctctccaaacagagaggggagctgataggctctgtcagcgtcatgatggcggctgtgttcagctcagaattcactgccttgcgctgatataaatcacacgacgtttttcggttttgtcttcatcccttctcttttgtccttcctccttctcctccctgtatctctgttcctggccttttaaagtcctccattacccatggcctgtggcctctccttttaggtctaacaatggacaggattccaggggccttaattttggtcatagcctctgctctgccccagggcgcagccaaagtcggattgtgccagggtttgtttatgctggaccgtgtgcccagggagagctgcgaaatctctttctggggaatggatggttctggacatgtttgagcaggactggcctgagtcaaaattgagagggagacagagtcgttatccctttctgttcttattttgggggaaataaagacaaagtcatttacacagctatatttatcccctgaggtgttactaataaaggagcatttgcccactaaagggaaccaggaccaaatgacaatgtataacctaaatgaatgactttccaatgataacttttttttgagacagggtctcgctctgtcgccctgagtgcagtggtgcaatgctagctcactccagcctcaaactcctgggcttaagcgatcctcctgcctcagcctcctgactgggtaggactgtgatgaaattttaaatactaaaaagagatataactatcacttcccacgagcgtttctctgttcccatttagggccagccctctgttgcagtgctcctttgctgggagcacagaatgaggatgactgaaattcacagttaacctgcaaacgttggtattgcaatagcctaacaagcttggacccagaagataggtcagctccctcatttcacagcctaagaaatggaaactgtaggatttacaaaccatagtttcagctgggtattttactggatgctgctaattttttaaaatgaatgttcagttatttttttccattctcctctctctctgttaaattacatttgcactcttcaccgagtgccagtgagccatggaatctagccagaaagcaaagctcttccagagactcccagccaccatcaaaaggtgcttggttttcaaagagcttcaatttcaatgctctctgaaatgaactattttatttctaaaatttctaagcctgatgaaaagttctccaagcatgcattttttcatgttaaaaatcacatctaattctctataacagtccccagagatgacacgtttatcctgcagtctgcaatgtggcattatttcccgtggtctcctgggacatcttttatgtaaggaattcatcactgaggatttgtcaaggaaataaatatctttttatcataaagaagaattctaaccttttcctcatatttattcctgggatgtctgccaaaacttttccttacagcttttactgatctgctgggaatataccgccttcttcatttttttttttttttctctaaggtctaaagagacggattgtcatttcccttctttagttctagaacaaccgattcctttcttctttggagcactgtttgctttgaagtttcccctccttccagagaggaaagcaccccttctctgtcttctgaaatcagtggctggtcatcaatatcccctctgtgtcaaaaacagatgagccacgcgtggctcctgacaacgtcctcctggcagaatgtgcgctcatatccggtgctgagtcgcccagggtcttctgaacaattggagcatttctggctcgcggctgaatgaggctgaaagaggctgtccttccatgtgtctgccggccgggaggagagctgctgtttgtgctgctggcgttgcctccacatccgctcctccacacccagctgtccccggctggagtctggagttccccggctggaagctgggaaacccacagtgacacaggcagtgtctccagggtctcaaacaatgttcatagcatcgggaagttcactccaaagatttccaaatgcccccgaaaatgactttctgacttggcgtgagtaactccatctctctctctgcttggatgggaattgtctttttagggtcagccctttttgtcttcctcgttggccagattattagtgaactagttcaatgaaaatcctttggattaggattgaaatgtgctcataaggtcgccaaaaacaacagattctatctttagtatcattcaagtagatcatttcctcccgataactgggaggaaagattttttgctggagaactgacctgatgacactgttttcctgacaataattcagaggcaggcttaaccttctcagagaggcaataaaaaaagtcacccagctgggtgcagtggctcacgcctgtaatcccagcactttgggagtcaaggcgggcagatcacttgaggtcagcagttggagaccagcctggctaacatggtgaaaccccatctctactaaaaatagaaaaattagtcaggcatggtggcgcactataatcccagctactcgggaggctgaggcaggagaatcacttgaacccaggaggcagaggttgcagtgaactgagatcacaccactgcactccagcctgggcgacagagtgagactccgtctcaaaaagaaaaaaaaaaaactggatgtgaccagctacaattcacgttaattacccagttagctcccggctgtgggttccaccttccaccttctacggcaactactacctgtctcattcttttttttgtctgtttagagacagggtctcactctgttacccaggctggagcgcagtggtgtgagcatagctcagtgtactctcaaactcccggattcaagggatcttcctgcctcagccttttgggcagctgggactacaggcgtttaccaccacatccaactaatttttttattttttgtttttttttttttacagatagggtctcgctgtgttgcccaggatagtctcaaactcctggcattaagcaatcctcccgccagggcctcccaaagtgctggcattagaggtgaaagccaccaggcccggcctattcttgtggcctgctctcttctgcctcccggcaggcaggtctgagcgctggatgcatgtctgctgttcgtgtctctcccacaccaccgtgcacgtggaaggggctccagaggcttctattagtcgggcgttgtggcgcgctgtaatcccagctacatgggaggctgaggcaggagaatcacttgaacccaggaggcggaggttgcagtgagctgagatcacgccactgcactccagcctgggtgatccaaagagcccctgccctgcttccttctcttaggttttgatgcttgcactatcacgcaaagagcccccacttgggagtcgatgtgactgctttctacacaggtttaccagggcagcccagctgagatcaagacagaaagctcctacccgtgttgagtttttatgcaagaggcagaagacagaatagcagagttagactcccagttcagcctccttatgactctgtgaccttttctatgaaaatgggaggccaggcgcagtggctcacgcctgtaatcccagcactttgggaggccgaggcaggtggatcacagggtcaggagttcaagaccaacctgaccaacatactatatctctactaaccccatctctactaaaaatataaaaattagccaggcgtggtggcgtgtgcctgtggtcccagctattcaggaggctgaggcaggagaatcacttgaacccgggaggtggaggttgcagtgagccaagatcaggccactgcactccagctttggtgacaaagcgagactctgtctcaaaaaaaaaaaaaaaaaaaaagaaagaaagaaaatgggaatgatgtctctgtgaggattcaatgaagtgcagcaggtaggaagctcctgtttaggagttctctaaaaactcatttccttacccttctcctcctgagcttcctgaattgatgtggccacggtgggtggtacatctgcaagcattctacgtttccttgcttgtccacgaaatggactttctcatctacattttgaagctctctgaattggggtgcagactcctagtaaaggctaggaatagtggcgggggagggtttcagacggggtcttgctttgttgcccaggctggagtgcagtggcgcaatcacagctcacagtagcctcaacaccctctgctgaaggaattctcccatctcagcctccagcgtagctgagaccacaggcatgcactaccacgccttactaatttttttttttaatttttgtagagacaaggtctggctatgttgcccaagatggtctcaaactcttggcctcaagcagtcctcccatttcagcctcccaaaagtgctgggattataggtgtgagacaccaccccagcctcactttttaatagaaagagtaactggtattcatgtaacacttaatatattctcacctctcttccaagcatcttctaagcgttctcttttaattctcccaacttctgaagaagtcctgttttcattcccattttacaggggaggaaacagacttcgagaggttatacaaccttcccaagtccccacagctggtaaacggcagtgctggaacacacacccagccctattacctcaaaaccactggtgtgagctttggctttagaggaagctacataacagtttgtgtcttctaaagaatattcagaatactctaataaatctgagtgttgcctgaaactttacaaaaatatatatatatacacatatacatatatacatacatatatatatgtgcctttcacaaaccgtattgagatcacctctgttttccccttgactcctacaccaactcatgtttggacaaccctttccaggtagcacttagctactgttttctcaatcaataacctttgaaatctcgcccttctacctagaataaagaggttccatccatcttctacttcattaatcccagagacagctcagattaaactctgtttagcttttgagtttacaaatatttgcttcggtctgttgatgaagcagtaaatcctttaggcactggttaatgatgagacacacccttccagcccgggagaggctgtagcagtaactgaaatgagagcagcactggcagaaggctagaagttaggaaggtagagaaaaaggggagggaagattgtgctgtgtataagatgcctgttgtaaaaattgcaaaaatgactgctagaggcacgagggaactatccgagtaagttgtttattgagtaatagtgaattcagtttgaggaatcttagagatgggtcaattggtaattttatagatggaaccatgagattagtaactcaaggcgttacaccatttaatggcagatatgtgatgaaaatccagtgtctttccctccagtcaccaccctctctccatgatagcagatttagatcatttaatttttttttagtagagcaggggtctcactatggccaggctggtcttgaactcctagcctcaagcagtcctcccacctcagcctcccagagtgctagtattacaggtatgagccactgcgcccagcctatatcctttttttaaacttttttttaaatttttttttttaaatggagtctcgctctgtcaccccggctggagtgcagtggcgccatctcagctcaccgcaacctccgcctccgaggttcaagcgattctcctgtctcggctccccaagtagctgggattacaggtgcatgccacaacgcccagctgatttttgtatttttagtagaagacagggtttcgccatgttggccaggctggtctcaaaatctgacctcctgatctgcgcacctcggcctcccaaagtgctgggattataggcatgagccacgacacccagcccttttttttttaatttccaaggggctaaacacaacctcaaagaggtttgcacttgcaaaagcatatatgtgttcaaataactgaaaatggataaatcagcataagcctaggtgctgatttgaaattagaatttttggtttggttttgtttttgtagagacagagtctcaccatgttgcccaggctggtctcatactcctggcttcaagggatgctccctccttggcctcccaaagtgctgggattacaggtgtgagccactgtgaccagcttttagtttttgacagtcccatttccctgagccctaaggctctgccctgcctcaatttcttcctggagtcattctgtcacttgagggcatcaaggcaggcagtgagagtgaacctccacctcttgatttctccctgtcttgtagcttctttccttcttcccttttaaaaccaacctgctgggtcagtggatgcctagtgggcatttgtggaggacgtgggaaagcagatcaatatcagagggcattttgggctccctctcctgacgccctttgagctgcttctgtggaatgttgctggtgtgtccgtgtcactgggcactcggccacctcttgccttggtggccacgtttgcttagttgcaggtagcagcccgcaggctcagatcagacaagccctgaggtagagcagcggtgaaagctccgagcccttgccccagaacagtggatttcctaaagacaaaaaaggcaatgggaacctcttttcgttacaatacggcaacctgaatacatgcagcaggttcacggggagctgctctgttttgaggaacgtggagtggaataggataagaatagccacagaacctccttgaccccacctccaaccatagctgccccaaagacctagctgctaacccagggactcaggaaacatcgtttgtgaacactgtgtgtgtgtgtgtgtgtgtgtgtgtgtgtgtgtgtatatatatatatatttttttttttttttttttttttttttttttttttgagacagagtctcactctgtcacccaggctgtggtgcagtggaccaatctcggctcattgcaacctccgcctcccgggttcaagcaattccctgcctcagccacccaactggctgggattacaggtgcccacctccatgcccagctaattttttttttcgtatttttagtagagatggggtttcaccatcttgatcaagctggtcttgacctcctgacctcgtgacccacctgcctcagcctcccaaagtgctgggattacaagcgtgagccaccgcgcccagccataacactatgtgttttttaaaagtggatctcatagaagtataaagtagaacagaagtttctagaggctgggaagggtagagagagtaggtgatgggggagatttgttgtaggacagaaattacagtgaggtaggaggaatgtgttcgagtgtcctatagcactgtaggatgttaatagttaacagtagggtattgtatagcttcaaatagctagagggaggatattgagtatttccaacccaaagaaatgatcaatgtttggataatggatatgctaattatcctgatctgattaccatacattatatgtaccaaaacatcaatgtgcaccccatattatgtgccaattaaaaaaatttttttaaagaaaacactgcctagttcgtattgttcctttctaaaggtgagctttggacctcaagtgttacactgaattgggtacgaagctctttgaccgatacttcattgagcaacagtgaagaggcagttgcaatgatttctctttctaattctactaggacgtgtgtgcgtgcgcgtgcgcacacatgctcatgttcaacctgccctagtttgagggttgacctattccaggcccagtgcaaagtgctggagatgtgttttctcattcagcctttatgaattaaggagggcaggtaacttacccaaggccacacatccagtgagtggttctgactttatcaaactcagatctgttttaccctctatccaccatccagttaccgccacagtggaaatctgcatgtccaaggcaggctggctcagtgattttgcggggatttgacctggtacccagacaccatcttcgccctgaagtaactcccaggctaatggcatgaaacggagccaaccagcattagtggtgccaaccagcattagcggatacagagaggggctcttgagccatctagtctgccaggactttcttgcctgttttctgtgggcttggtatctaggctaattattggaaatgataataatttgggtagcattaatgagccctggaactcagggccaaatcttaactaatcccataactagcaacatgatcatccaaaaactgtgtgctttacctcccttgagtttcatttgtaatttgtgccattccagaacacagttaattcttagattggacttaataaatcattatttcctattgagaggttaggcaggggtgaaagggaaaacaatgaatttttcacttgagctagaaatcctttaatcttcttggacccaagtttctctaggtctgttttttaaatctaaagtctgacttccttccagtattgttttacattcttattaattctttcaatgatgaaacggagtacttcagtaaatgttcctgagtcttcagatgtgattggtgactgttactaagagaaccagattaagagtcacaatgatttagccatgtaaccttggagggacataaactggagacaatttaggattggtaagcacagggtgattggcttatggagagagcaaacctgaaccatttcaaaaaggggaacctgcaataatgttcagcgatgtgctgtgtgaatatgacactatatggatttagtacctgagaaccatgaggtcacggatgaagctttcttgtgtccagttgcatttggagacctgcaactgaagtatgtcaaaatccaggaaacagctacgaaaataattcaaagctcggaaggtaggttccacgatggaacaaattacaggtattagatttttgttatgaagaggagataattatagcatccaagtatatgactgtgaacatttatttggttgttcattcaagctaatatttgttagctgctttggaggcataatgatagtatgtttctgcggtgacagatatattctctatttcaagctcaaattgaggcaagggaaagaacaaaacccatgttagagttaaaatgttcttagacattgagagttcttggtgattagggtagtaagagcctgtatgtatggtaattgatggaatgcagggttttctgctcagagacgttaaatagaagaatagtatatttatggggacaatttaagtgaagcagagctgtttgatgccacgggacagaagttctttctagctttatgatgctgcattgccttttctaccattggaagaaacagaactgtggattctgggaattctgactggattattctctcatctgtttactaaaattgtccaaaaaatccattgtttcctatggaaatagaattttttcatcttcctaccaaaagtcctgccaaggttttactgggattgcattgattgatggagaatggacatctttacaacatcaagcttctaatccttgaccacagtgtatctttctgtctatttaggtctttaggacagttttcgcggtggagatcttgctcatctttaattagattaatctccctaggtatttgaagttctttgatgcagttgtcaatggcatggtgtgagccccttgaatgcacagcctctaacacctgtccgtttctaacacttctgctcacgatgggcttgcaaagaaaagttgtaatcggctgggcgcggtggctcatgcctgtaatcccagcactttgggaggctgaggcgggtggatcacctgaggtcaggagttcaagaccagcctggccaacatggtgaaaccccgtctcaactaaaaatacaaaaaaaaaaaaaaaaaatagctgggtgtggtggcgggtgcctgtaatcccagctaccttggcaggctgaggcaggagaatctcttgaacctaggaggcggaggttgcagtgagccgagatggtgccactgcactccagcctgggcaacaagagtgaaactgtctgaaaaaaaaaagaaaaagaaaagaaaagttataatcagcttttccctttgtagagagtcagtgttccttttctaacccatcaaggtagaaaaagtacaatagcttcactccaggaaagttatttcagaatccaaacactggcagcccagaaattactcctttggtctaacctaaattcctccagatggcatttcagcttattttcctttggtttggtttgaagtttgccttccacaaggtttcctatcgagcactctgctatttgaatcatcatgttttacccaggaaaagtatgttaaaatatgtataacttttattaggagggaatttgctcatgatacaaaacatgaagttaaaaaatacaatagcattctaattttattttttaaatatatgtacttagaaaaaaggccaaaagaaaatgcatagcaatggttatttctgggtgattagttaatggactatttcttatacctgtctacattttcagggttttcatcataaacacacattatctttgcactaagcaaaaataataagtatttttaagggaacaaaataacattttaaatacgttttagggctgggcacggtggcttacacctggaatcccagcactttgggaggccaaggcaggcagatcacttgaggtcaggagttcgagaccagcctggccaacatggcgaaaccccatctctactaaaaatacaaaattagccgggtgtggtggcggatgcctgtaaccccagctactcgggaggctgaggcacgagaatcacttgaacctgggaggcggaggttgcagcgagccgagatcatgccactgtactccaggctgggtgacagagtgagactgtctcaaacaaagataaataactcaatacgtattaaaattgctgacatgagcttttctttccccctttcttgtgtaaagtctattagaatttgctagtaaaatttaaaaaggtatgtgacatttcttaagataattgagaaagataaacttctttttcaggagggtccatcttcctgccatttcttgtgactggctataaattccatgcagtgctggaatgtgcttctcacagttagagtgctgagcacctgttttatttcacactcccttgattcctggggtaaatcccatctccgcagcatgggctccagttaaattcattagtggtccagatgtgtgtcccctgtcacctggccaagtaaccccactgtttatcgacaggttctcaggaatcagatagctcgcagtcggccaagaaggacatgctggctgccttgaagtccaggcaggaagctctggaggaaaccctgcgtcagaggctggaggaactgaagaagctgtgtctccgagaagctgtaagcctttcctagctcatcccgttgaaattggtgttgtctgtgatgtcactgatctttctgatgtcatttgatctttttgatgtcatttgactgatgtcatttgatcgttttgacagaaggcaagggtagtgataaaaagagggcctatctgggcggcgagcgctctcctgaaacacaaatgttggaaacatccaaacctctctaatgtgctttgtcagagaaagagcagaaccgcattagtgcaaatcttaagaaagcagttgacctggctgggaaatgcactatgtgatactgttaatattagcgaatttttttaaaagaatatgcttaaagggttggaaaaaatatgggttttggtgtgtgcctttaattatttggaaagccttgttttgttttcaacaaaagaaaaagtccctaaacccatcaaagaattggttgatgaagcactgtgatgaccagttaaagttggtgctggcaaaatcccaaagaggaccccatgggagtccaagcgacaagtcccaatgatgatccctcatccctcatacttgcatggtggttcataaagcatctcctcacgtgatagtgcctcatcgatcataatggctggccaccatcctcccaagattttgtgcctgagtttattgttgtggtggcttttgttctttcttaagggtatttcagacttgtctttggacatcctattgagaaacactggtggtcaacaaggaaaccacgatctcacttggtatatagtcacctttagaccctgtgatctggtgtttagctttttcattttaaaaaatgaaatcttagcctaatgacatttttaaattttatgcaggctgggcacagctgctcatgcctgtaatactagcactttgggaggctgaggcaggaggatcactggagaccaggggttggagactggcctgagcaacatagtgagaccctgtctctacaaaaaaatagccagaggtggtggtgtgtgtctgtagtcccagctactcaggagagtgaggcaggaggatcgcttgagcctgaaaggttgagactgcagtgagcagtgatcacgccattgcactccagcttgggtgacagagcaagaccctgtctcaaaaaaaaaaaaaaaaaaaaaaaagcaatgctttctcgaccctatgtatgtgctagtctcacagaagttgctgcaagctgctgtctttatttatttaaatatccatttccacctttgtctgtttatttcatgactatttgttagaagtgtttgaaggcttcatgttttaatgcaatacacatgactctgtgtgtgtgtgtgtgtgcgcgcgcgcacgcatgcacatgtgtgcattgtgcacatgggcacaatggggtgggagctctccagggcaggagcaactgtgcaccacctaaccttagaaagagcttcgccggtaaacagttgagaatgggaagtcaaaagaggttcccaaagtaagtcaaagagacgtatacccctcccccaaacactaaggccttgcagcgggaagaatgaaacaaggggccgtggagtgagatcacattacatttcaacttggcttaattatggtctggattgatttaaaccggagccagctcaaagcagaaccacattagcacaaatccattgcaaatcttaggaaagcaattggcctggctggggaatgcgctatgtgatactgttaatattagcaacatttttataaagaatacgcttgaaggattggaaaaaatatgagtttgggtgtctgcctttaataatttggaaagccttgttttgtttttaataaaaagtccctaaacccggcagggaatccacgtttcaaaaaggtaaggaacatgtcagggcaagatgagcatgcattataaaaaaatctcaccatcgctcttaaaaacaaaaacaaaagaaggaaaacaaagctgccacttcttataatgttaacaccagaaaatgtaacttgagtggaagaaataacccaacaagaaatcagttgcaggtagatttctcctgtgatcattccctatagttagtcccaccatagcctcttgacgcatgtgtagtcaagggctggggggaggtcttgctaaatctgtgctgttcctgcatctctcccctcagctcagagtatcaagacgcgctgcttgacccctggggaggggggcaactagaatgagggagggggagagcatttggcaggatatagggaggcaccaagccgaggccccactgcagagtgttaaattacgtcttcagcgtgcagctccagttacacatgaaatcagattaaatatctggagaatcaagacttcgactcaaataccttcaagtggatggtgaaaaaaatcagtagcctcattttttaaactacattttaaaaccaccaacagtttagagttacagatccatggcaattttaacaacttttccctcctttttggaattttctaagtaaaaaaaaaaaatcaagtcctgacaatataaaaccctcaatagttgtgttacttatagatagacttttagggaagcagattaaaaaaaagttgcggaataaacacttaactactttggagacatttgaaccacattttttttttaaagaaaaaaccagggaagaaaattgcagagtctgatactcagatagttggccattgtgctctgaaatgcttacattgaggaatataaagtccacggggtcatttcccggcaatctgaacacagcgagggagaagcaggcgagtgacggagtatgtgtttatgctcatgtcacgtgtacacatgtacacacgcacacacatgcacacaccatgcctgcacatgcatacatgcgtacacatgtgcacacagcagttggagaagaagggccagcatcacactctcatgatttggattttcccgcctgctgggcactcagccctgggctgccctgcgcaaaagctttctgtgtagatgatggatattcctgagaaaagcctcctgaacttccttgtcagagcagctccttcagtctttgtgcagcatctgcgttgatttgggctagaaaagccagagctgggcttggcctggaagtgcccactttgccattagagacagatgcacagttggtcccccagccttttctggtctctggaagtgacttcttgaatttgatgcctggcctctacagtgcggggcagccactgactctgatttgatcattgttcagccctgatacaactcactcacagagagcctgattctaatcttgaatcgcccccagatccttagcctttaaccaggatcactgtcaccatggaagtctgtcaactaaattcactgtccttgtacccacaacaagtagatttccggggcccaaaatacacaaaacaagtgtttttttagtagccttgtcaataacatggattatatgttcagtttctactaaactttttttttccttaataaacagagtctcgatctgtcacccaggctggagtgtagtggcatgatcttggctcactgcaacctccgcctcccgggttcaagcgattctcctgcctcagcttcccaagtagctgggattacaggtgcttaccaccacgcccagctaatttttgtatttttagtagagacagggtttcaccatgttggccaggctggtctcggactcctgatctcaagagatccgcctgcctcggcttcccaaagtgctgggattacagacatgagccaccgtgcccagccattctactaaaacttttaaattaaacagtttaatgtcttttaagtacagcctattcctgtagcatctggccagagtaggttactatccttactcagtttctaaattatttatctatgcacttttctgggatttgccatatagataccactcctcttgtgaaaatccatttgaaggaaactttaaacttagatatttgagcaggaatatttgatgcagtgtcaagagcacgggatttggagttagagaggcccgagaactcacgctgacactgctcctcactggctgggtgaccttgcctggcacagaggaggcaggcaggaaatatctgttcacttaacaaatgaatgaaattcaagttttataatgaaagtcaaatggcaattacagaaatttactttggaaaaaactttggaagtgcaactattctacataagagacattgttagagaaatgaaatttcatttcttgaactcttacttaggcatagtgcttaatgtgaacatttctagcataagcgttgacctgtatcgaagtgcatgcgtgcatttttgtgtgcgtgtatgtgcgtgtgtgtgtgttctaggaagcagacacgccccactctgatttgtgctcactccgaatgccatttcacatatgcaggagctcacgggcaagctgccagtagaatatcccctggatccaggggaggaaccacccattgttcggagaagaataggaacagccttcaaactggatgaacagaaaatcctgcccaaaggagaggtgcgtccttcctttctgttgttggattctctcatgttatccttgtttttcccattggtcaggccttccaggttttctgtaccaatttcttcatttctgcctaatgccagtattttcgctcataccttttcttgagtgagctggccggtcagtatgtggttcccctcggtaggagtagtttgcttgcatttgcaggcatttgggtgtctgtcgaagttgcttgtctgacgctgtgggtctagcgcaagcagccacgttgagcttggggaaaacattccagtagcattcacgtgtatttggctttgtaatggcctctcagccctcagtgactcagagccaagcttgatgtgtgatctatggaagaaaaactgccgagagaaggaaaacttaggccacggcatcaggtgcaagggtacattggctggggagagaccagtagggtccaccgccccgtggtcatagcctcacctggctactcacatccctccaagaatgtgtgcaggatgcttgggcggccctggccttgtttgtctgtgtttggagaagctacgtccatcctttggactgaacacgggtgaagatggggctggagacttcagatttggggagaaaacaaacaaacaaacaaacaaaaccaagacttgactctctggctggttaatgagaatccagcctcaggccaagagaaagtaaaggccaggtataccctcaggcccagggctcctgcccaggaaatgctttcccagatttcttctgaaggaagttactaattaacatgctcttgaacagaggccttaaaaggtcaggacttagagccaggggaaaaaggaatgctgtacatttttagtattttaagaaagtgattgggagaaacggacacctggggtaggtaggattagggtgagggtgaattcagagagggacccatgtgcttgtggcccatctgtgttagaggaatctcctgagatctgcagtggcaggtcctgggacactggcagacacaccaatgtgcttcaattaaaactaaagctcatgtggccgggcgtggtggcccacgcctttcgctgcaaaatcccagcactttgggaggccagagtgcgcagatcacttgaggtcaggagttcgagaccagcctggccagcatggtgaagccctatctctaccaaaaagatacagacattagccaggcatggtggtgtatgcctgtaatcccagctactcaggaggctgaggtgagaatcgcttgaacccgggagtcggaggttgcggtgagccaaggttgcgccactgcactccagcctgggtgacagagaccctgtctcaaaaaaaaaaaaaaaaaaaaaaaactaaagctcagttaggcagttcctggtctgtaaaatggagctcatagcccttacttcttggggtgtccctgggattgaatgagccagtgtatgtaaaacacgtcactcagtacttggcacttgtgatgctcagcaaacagttgcttgtaggggagatgcagtctcaaaggaggggtgccacaccgtaggcaggaactgcaggggacggagggattgaggtcgggtatttccaaatcctgctggtcatcagagccactctagggaggaacttcaactccccctgttgctgggcagatacctggcccttaagctttaaaaagggaccccacttttagggagttcccccaacaccctccttggtcttcccagagtcccaccacacctttcacgcatctcagtaccgcgggactttagctccctgagaatgccctagccatgtgcttccttacctgtccccacacatgatctttcctaagttcgtaaaaggaaccaacacaggagcagctggcattctgcggggttcctctgggaagcatgagatgatcacctggtctctactgtggctcctggaaacgcactttgcttccctattcatataacaggcagacatttgcatggacagggcattcagccttggacttgtcttagtttaaatagtgagaatttgtcctgggctccccacaaaactctgaatcagtgtctggtgccagggccattgtaacagctcaggaacagctgccccagggagcccaaactcacagaacagtctttgtcccttggtgacttgcctatttcaagaccacaggcaggagtccatgttgatattcttctccctctgagacaacagcgcagccagccttggcaggattcagaaggagtttattatctccgaaacagttctctttaaccttcaccttttcctctcgcttcttgttcctgctccctttaggcttaaagtgctcaaaagtcaatgagatcaggcaaagaacttctccttgatggcatcctccagcttggtgcattgtgcccagaggcaaggatattttactgagcaactaaacaggaagatctgttgattctagcaaacaattgatctcctcctatttggctagatcagttcccatcaaatttcagcgtgtccgtgaatttcctagggcaagatgtgtgctctctctccctggccttgagaagctgccgatgcatttgtcctgggtttactagctgtggggttaggcaaatattctacctctccttcaggctgccaaatatgcccaccttgcaggaccctgttgctcaaaatctcaaccgacaaggtgctgtttagagctagctctgatccggaggggttttactagagaagagaggaaatagaaaaatgaacaatctgacgctttgcgggggattccgcattcatccccaaatcctcacgcacacatgcatgagctacctccccccatccttcagcagctggtgtacatacatctgcagaggagaggcttggtcagcatagaggacagcagcaaacatgctgtctaggtgtcatccgctaggtccaccaggcatttttgacagccacagcttcattcttcccggtcccaaaactctgaggagaatctcatccatccgtacttcttggctaaaggaagaatagaggtgggagggagctacagtaaaaagaggggaaggacatcaagtgagctgggggggtggggtgggagggggactgcctccaccaccacccactgtccatttgtgccccttgaagggcccggctgtagcctagcagagtatacatgaataggcagatgggggagggacagccagagcttgcaaaatgagctcccatggccgggcatggtggctcacacctgtaatcccagcactttgggaggccaaggcagaaggatagtctgaggtcaggagttcgagaccagcctggccaacatggtaaaaccccatctctactaaaaatacaaaagttagcaaggtgtggtggcaggtgcctgtaatctcatctactcaggaggctgaggcaggagaatcatttgaacctgggaagcagtggttacagtgagcagagattgcaccagtgcactccagcctgggtgacagagcaagatccatctcaaaaaaaaaaaaaaaaaaagaaaagaaaagaaaagctcccgaaagacatgcgggtgagtggggatacagggaaagacaagatatgtgagtcagaggcctgtgagttaggcacacgtgaggggcacacagtgtgagagtcagaggcccgtgcattagctcatgtgtgtgagctccttggtagcaagtccacagagaagaatggcataaagaaactaaaaatcctgctgcatcctacatccaaaatggaaaggaagtgacagtcacttgggctctgaatctctccaaaggctttggtttgtcttgatgaaccttgctggagacagtcgaaacacagccaagcgatccctaaacctgcatcgtgggaactctgttctcagcgatggcggcagcgttcacaccaacacttgtcttcagaaagtaacaggagcaagggttacaacagtgggtgtgcctggggacttcagtgggtgcagattttaggagtggggctactcttaagagtgtctcccatggaactggacttgccttgggacaggggagggaaggatgagggtctccctgctcagcatccccagtaacccaaaccggtgctttccctcccacaggaagctgagctggaacgcctggaacgagagtttgccattcagtcccagattacggaggccgcccgccgcctagccagtgaccccaacgtcagcaaaaaactgaagaaacaaaggaaaacctcgtatctgaatgcactgaagaaactgcaggagattgaaaatgcaatcaatgagaaccgcatcaagtctgggaagaaacccacccagagggcttcgctgatcatagacggtcagtgccaaccgggctgcccccaccccactcccacgcccgggccccggcaaccagacgccaggtcccacgagtggtccctgcacgacctgagcagctgcctaactgtccgctgccttcatttgtccatccataaaatgaagcgagtaaggcctgatcccacatgagagaaaccaagtggactcagacacagatgaagggattgtacgaatcaaactgttggtatcactattggtttcctccctgggagaacctgcagccaggagctagcattcttctcagcccttactgtgaactgagctgagttgactgggctagaccaggctctgacactctcagggacctgaccacccctactcaagtctggaaggacaggtggggctggggtacacagcagcagtgatccctgtcttcgagcggcccccgccaacccactgacccctatgctgccaggggcctcctatcccaagagctgaagcttggggagactggaccatctgattatctggaaccctgagctccagtcatgggttaggaatttgggtgatgacctttggtaaattctagaaggaaatcccccaaaatccacccacaaagcatcaagtcccctaaactgttagaatccttcttgtctaagtcagtgaattcttgaaaatatatatcaagcattctttcctcctaaacacacataaaggtatgtgtgtttaaaatacctttgctctagaaagacagaaagtagaatagtggttactatggggggcttaggggacaggggaatgaggagttactgcttgatagataccgaatttcagtctggaaacatgaaaatattattcaaacagaagatggatggtggtgatggttacgcaacaatgggaatgtgcttgatgccaatgaactgtacacttaaaaatagttaagctggggctgggtgcggtggctcacacctgtaatcccagcactttgggaggctgaggcgggcggatcacctgaggtcgggagttcaagaccagcttgaccaaagtgtttctactaaaaatacaaaaattagccaggcgtggtggcacatgcctgtaatcctagctattcaggaggctgaggcaggagaatcgcttgaacctgggaggcagaggttgcagtgagctgagattgcgacattgcactccagcctgggcaacaagagcgaaactctatctcaaacaaacaaacaaaaaaatagttaagctgggcatgttggcatgcacctatagtcccagctactcaggaggctgaggcagaaggattacttgagccagaggtttgagactgtagtccactatgattatacctgtgagtaaccatgcgtgccagcctgggcaatatagcaagactcatctctgaaaaaaaaaaaaatgttaacatggtaaatgtgatgttatatatatttcaccacaattacatagatagataaatatagatagatgcagatttgcagcctaaactcgtgagcatcctagcgtagcagtgatgtgctgaagattccaagatgccgaagtcagagctcctggttgctcatagtccatcatgcaacataaataaagtgaatttctagttaaaaagagaattttttaaaattcttttgctctaggaaatttggaatgaccatctttccctatctcatcctgttgtccttggccaagaccacacaaattttcccctacctcctagtaaagctccctcagccaacctccttctgacactccatttgagaccctctgccccctccaaggcacttaggggttcccaacagaaacatgtttcctatagaaacatccaaggacccacttgaactagaggagtaattaaggttcttgctagttccttagcatattattttagagataaaacaccaaacttggaatctgaagacttgggacctttgctcacattgctggagagcaaaaccacctcggacaaaccattcttcccttccttcccctcagtttccccagcagtgaaacagggaggattattttaccatctcccttttgggtgtgttctcccggttaattgaatggcatctataaaaataagctttggagagatggagcctgtatttagcacgcttgttttctctactaatgacttacaaagtttattgagaagccatttattgccacagaagcaaagcaaagtgcctaccctggtttcgcatttgtagaatcaaaagcagtttgcgtcctttggttttgctggtacacgccctgggtttgtgcagggacaatgatgtggtttaatcaggctggggcagcctttatattcggtatgaagccactctgcattgcagtattctatgaaaccggggcacaaacacacaaaggctagggcacatgggcacatggcagtgtcggggtggggaggctgagccaatgacccgccacagggactgacaaaagaaacacccaacagcatttttattgtatctggtgggttgtttctggttaggaagagaaaggtatgaggtggtagtagacatgctatttttacagatagggctttgctgaaggaatgtgctgaactcataggctattgctttttgtcttctcagatggaaacattgccagtgaagacagctccctctcagatgcccttgttcttgaggatggtaggtttatgcatttcctgcttacaaacctacagctcagagtaaacagagatgaatttctatgtagtctggggattgccttgtgtaaaggcaagagccaggccaaaaggcagctgggctccctgcaagctctctcatttccctattcacctatttggttgggagtgggtaggtgctgcataaacccatgtgtattagagcttttcatcagtgagtggtgctttacttttttagaagccaaaaactttttttttttttttgagacagggtctcacactattgcccaggctggagtgcagtggtatgatctcggctcactacaacctctgcctcctaggctcaagtgattcttccacctcagcctccctagtagctgggactacagcatgccaccacacctggctaatttttgtatttttttgtagagactgggtttgccatgttgctcctgggttcaagcgacctacccacctcggcctcccaaagtgctgggaggattacaggcaggagccaccatacctggcccaaaaccacgtttagctagacagagaatctacacactaggcatagcttccttttgagtattcatggtatctaaaagaaaagggtagaaattgatttagatcacaaatcaaagattgaaacccactaggagagtgtaaggatcgtgagaagaaatggaacacaccctctgttgcttcccaagacagtagtgaaagtaagaggggagatatcccagtagatacacactcaggctggaaaactgtcttattatttcccactgaactcttaaaacctggcagttaggatattttcttgggaaattcttaaaaaaacagaactgatccctcccccaacccccatcactaccatacgtcggggaagaaagaattccaaacccagaaccatgtgagaatactcctgtggatgtttaaccatcgtactgggaggcgggtacattaattatatggaaatatattaagtggcagttaatttttttgccctgtatggaaacctcaggcaggcagtgataagtggctgttcagatggaaagcatgaaaggtccacactagtcatagtaataatgataattgcaataataataatgattgctcttgatgtgaggaaagtctggcggattatttacccagtcaccttggctgtgctattagaaatcagattggaatatatttgtctgcttcattacaagccggggacgccactgggctacaaggaaatggggggcttgagcatcagagatcccagccctgcggttggcctctgagtatcccagtctcccctggaaagggaagaaaaattgagagattccttggtagtagaggggtgcctggagcaataggtaatgtcacggggtaattttgagatatcattccatgattccagcttcttccccgtgttccagatgcagacccctggacttcctcacaggtgtcggcacatccttttgccacagtcccactgcagggtctctttctggggactcttcctttactgacttgagggcaaaggaggagtgggtgcatagtgggtgtccacggctgggggactgagaattaggctgtgaaacaagtcgctggaaatggatttaggggcaagtgaatggtagttggttggttgtaaggtttgcttctgtgcttttttcccctccacctcccatgtctgccttccctgtgaagcctgaatcgttccctcctctctcttctcaatgctgacctgccctagcctgaagtcctcattcatccccctctctagtctctctcccttcctttctagttttagaacgctgccaggtgaatagttctaaaacaggatttttcactccgatgcatccgtgcttaagacatcgcaaagttttcctgtggcttttcaaaatctcaactcggaattccaggcccccatcagtcgggctcttggctcacatggtgcacacagaaggcggctgtgctggccagagctccgcccttactccccctgcccctcctcaccagcccctgcctggccagatgtgcctgcagctggtaccctgccctcagggcctccacactttggttcaagcccttccttcctcctcctctttgcctgcccactgctcaagccccttcaagaccagcctctcccacagcacctcctagactcactgaatttgctttttctgaaagtcctctagcgcactgacgtgttagatcatttctttcctggaggcagggaatcacttattaatacataatctttgtagctcatctccttaaagaagttaaggcagtttcaaaattaaaatatagaggaagagattaaaagagaataaacacagctctgggggaaaaaagcagagtagacacccgatccacccagcaggtatttacagtggacatatagaccctcattcattttttcttctccaaccaatggttatcaagcacctactatgtgtcggctgaggatctagcagcagatgaaacagacaaaactctcccagaactcagaccctcccacagtgaatcagatgcttagcatctgttgaaagacaacttaacactacagcagtaactacattttgctgtttagtatgaagcagtcatttgttggtggtatttaatgacattcagacttcactccattcgtgtctaatcaaaagtgacgcgtctcttcccatgcaatcccgcctgcagtggaggtttggcttgccctggtttggtttgactcgtcttgacttgtcttggcaactggggaagagtttcagggtttctcatcacaggggtgagggtgtgggtttggctgtgtggctccaaggtgcgggtggaggggtgtaggggttctgtctcagcctgtgggaaggatgaccggggctcagttcctctcttcctgtctttgtgcagaagactctcaggttaccagcacaatatcccccctacattctcctcacaagggactccctcctcggccaccgtcgcacaacaggcctcctcctccccagtccctggagggactccgacagatgcactatcaccgcaacgactatgacaagtcacccatcaagcccaaaatgtggagtgagtcctctttagatgaaccctatgagaaggtcaagaagcgctcctctcacagccattccaggtgagctgcatcgtgaatgaggccaaatgaggcctccctctatgctctggaagaatcaaagggccgtcccaagtagcatccacggtgacaaaatccacatcaacctagttcctccccgtggggtttgcctttcacggggccgtgctcacagcgccctctgctgccgacactgttgaggtacatttttgtgactcagagaaattggggctttggcccacaatcaacgtgatggcagatggtttgaatgctgttaaattccagaggaattaattaggaaatctcaggcagcgctattctgaaatagcaagtgaaagtccactcggagcaaatgcagagtggttcagaactctaccccctcatccagcagaattctccagccaagcagctgtaatccaagctgtgtattatcagctcattaccgggctgactttgtagggaggttttttttgggggggaaggcattttcggtctgcttctctgtttttctcatttcctttaatcaccctaccaagctccaaggggggtgccaggacaggtaaatatttgtttcttggaaaacaaaaactgtaagggcaggaccgtcacactgcctgacacagagaaggctgaccagggttttcctctcatattgcctaggttgggaggggggagggcataccccctgctggggaaaggctgagaaccacagtagaggtctgaccaagcgaggtgggagtcacgggcgagctttccccacatgctgggatcattgtcctgaactagccagccccccaggaaaggtgctgtctgtctggcggtgaccacgtggcatccttggctttgcagcagccacaagcgcttccccagcacaggaagctgtgcggaagccggcggaggaagcaactccttgcagaacagccccatccgcggcctcccgcactggaactcccagtccagcatgccgtccacgccagacctgcgggtccggagtccccactacgtccattccacgaggtgagtctgcctggccttcctgctcagaccaagccttcctttttaaaattgggcattgtcagccccaagctggcccaaataatggatgagctacagtcagacctgaacctgggaggataaatgaagcggaataaaaaaccaagctggcagcagtcaacccccgttagccaagagacccatgcacagggcacttggagtcagccaaagaatccccgggcttctggagacagggagcatggaaagtttcctaagcaaagcagaggccacagaggctggctgggttagcatgggaagaggtcttctatctttctactgaggcctaaatttatactggacttcctttagtgcctcaaaatgtaaattcataaagagcaaaagagccaggcaaaaatgaggcttcagtgaatcacaccttctgtttctttttttttttttttttttgagatggagtcttgctctgtcacccaggctggagtacagtggcgcgatcttggctcgctgcaacctctgcctcccgtgttcaagcgattctcctgcctcagcctcccaagtaggtgggattacaggcacctaccaccacgcctggctaatttttgtattttttagtagagacggggtttcaccatgttggccaggctggtctggaactcctgacctcaggtgatccacccaccttggcctcccaaagtgctgggattagagacgtgagccaccgctcctagccacaccttctttttctaaaaagaagcaaaccagatcacggagggccacgtgatgggggctttcatcccccttctgagtggcagtcggaagtgggactcgcctcttcctgtgcttggcccgtggggccgctgtgaagttcacatgcagtcccagcatcgggcaacatcatctgccatgtgatactgttttgcacttccctaagccctgagtggactcaaacgagcagaatgaattataaagtaatggtatggtgagtatttgcatcattcattgtttaattatctcatttgccaccaaccttctatttcccagttttcacaggaaaggggagtctatttatatggatcatgtaatagtatttggttaaacaatatgaagggcctctgtaggactgcttttatctgatctgtaaatagggacatttcatctggtttgtgttttctttttttttttttttttttttttttaagagagacagggtcttgccctgttgcccaggctggagtgcagtggtttgatcatagcttactgcatcctcaagtgatcctccctcttcaacctcctgactagctgggacccctggtgtacaacactacacccagctaattttctaatttatttgtaagagatgaggtcttacagtgttgcacaggatggtctcaaattcccaggctcaagcaattcttcagcctcctgaagcactgggattacaggcgtggaccacagtgcccagccctatctggtttaacatgatactaaggattctgtgattctctttgtgtctatagaattatttaaaaaaaaaaaaaaaacccagaaatcgaaacctttctgtgagtcctagcttcagtcccacttcccactgggaatcatggtggagaccccaggttcacctcccgcaatgggcagttcccggatccctggggcagccctgctgagtgagactctggcttgctgggctggggcctgcgcccgcgtgcagacacccagtgccctcctcaggaccccctcctccccggagcacccctccttgggcccactccccacccccagaccaacccgggtcgtctcccggcaggtcggtggacatcagccccacccgactgcacagcctcgcactgcactttaggcaccggagctccagcctggagtcccagggcaagctcctgggctcggaaaacgacaccgggagccccgacttctacaccccgcggactcgtagcagcaacggctcagaccccatggacgactgctcgtcgtgcaccagccactcgagctcggagcactactacccggcgcagatgaacgccaactactccacgctggccgaggactcgccgtccaaggcgcgccagaggcagaggcagcggcagcgggcggcgggcgcactgggctcagccagctcgggcagcatgcccaacctggcggcgcgcgggggtgcggggggcgcggggggcgcggggggcggtgtgtacctgcacagccagagccagcccagctcgcagtaccgcatcaaggagtacccgctgtacatcgagggcggcgccacgcccgtggtggtgcgcagcctggagagcgaccaggagggccactacagcgtcaaggctcagttcaagacgtccaactcctacacggcgggcggcctgttcaaggagagctggcgcggcggcggcggcgacgagggcgacacgggccgcctgacgccgtcgcgatcgcagatcctgcggactccgtcgctgggccgcgagggcgcccacgacaagggcgcgggccgtgccgccgtctcagacgagctgcgccagtggtaccagcgttccaccgcctcgcacaaggagcacagccgcctgtcgcacaccagctccacctcctcggacagcggctcgcagtacagcacctcctcccagagcaccttcgtggcgcacagcagggtcaccaggatgccccagatgtgcaaggccacgtcaggtgagagggggcggccaggtgcacgcgggaagacctgagggcgaactgcttgccggtgtcaagggctaccgcggggaaggtacccttaggactgggtgcagtgaggaacgggaatcattaattaattctgggaacgctgctgttagatgcgggagacttgaggtcttccaggcctttgttgaccccgccccgttctaaccctaatcttgcaccataaccgtgcacctgaccctccagagtgcactgggccagctctcccatttctccttgtaaagacagaaatctaagaaagttagttaggtaaagtaaaagtaatgtctctgggtttatccaaccaaaggtgtcttttaccctagtgaggagagtatcccagtgaaagcccacagctgtagcttgcaaaggaagctgggttggggatgggcttgggtcaagcctagagatttggccagtgtctccccagatgggggcagactggctaataaacagtgccagagctgtgcgtttgacagaattcctggctgctcctggctttcccatttcgatgatgatgttatgccatagccacaaactattatttaagtgtcttaaatatccttgacgttatatctgaaaatttctataaagtttaccttatattctcatactcaagagcattgggcggtattgaatcaagtaaaaaacaaaaaaaaaaggaagaaaccactcattcccttaagttacatttaataacagtgacaatgaccaacattgagcagttgcctcgtgctccggtctcagcactggcttattaacatactcttaccactcagagagggacactgaggagaagagaaatggtaaacatcataagaataaaatgagaggtaagaataaaatgagagtcagaagcaaatgggaggaactctgagtcaggaatttggtaaagatcgggggaaacagagtgacctgagataatggggggttcatctttggggaactgtaggagattcttggtgcctggagacagcagggcaaagaggaaggaagaacctggatgccctagcgagccaggctccggcattctatccccacatccccgtggacgtttattagggtccactggccaaatgacaagctccaaagatcaggtaatggtgggtgttccgtggacttcggggtcccagaaccttctttatgttccttcttcatctgtaaaatagcccagtgaaatttgccattgactccccaggaagatcttgagtatgatcattctgtgaccctattagataaagaaccaacgttttgtaaatatctccaacaaacaggagggtttatgttctatcaaaactgcagcactggtctagtagatttgctttatgtaaagagatgaggtagatcttttggaacatattttagactaaaattgttaagctgtatctgaggtttactgatggaaaggattcctttaccaaaaaagcaaaggatgcatttacgtaggattgacttcctactaaatctttccagctggacttccatgctgcctacatcagtaaatgcgtagtggtcaggtttggatgagctattaaaagccctgctcccttcaaagcgccctacagtagcaatgataagcctgaaacagcagagagagcaggctctgagaacctttctggatgccctctcttcacaatggggagaaacaatttcataacagggccacactgaaaatgccctggggccagagaaatatgccctccctgtatgagccctgctcaggtctcgctcaaaggactatggggacatcagattctttgctgctgtagaaaccgtcaccatccctatgcctacctcctggtggcaaagcggggacctaggatcccaggtcagcttgactcagaatgaaggtgcatggtagtgggtagaaaatggaatgggtgggatgcagaggttgggggggcatgtagagatggttgcccactgtgaccatgccatagggatgctgagaccctgctctggggtccttcccagcatccctggaaatggtgacctctggccactgggttggtgtcagccaacaagtcgcaagctccttcacctgtgtctgatccctgtctgctctctgcctttcttgcaccacctgcatgtagctgccttacctcaaagccagagaagctcgacaccgtcaagtgaaattggagccacccccccaagcagcccccaccacatcctaacctggcagactgggtgagttctccttctatgttcttcactgtgtcagctcgaaagagtgtcatagacgttcagatcctggtgacataaggatatgtcagtaaatggatgatgagggttcatcactgggaggtgtcttcctttcaagagaagccccatgatctgctgtcacctctgcctactccttttcctggctgtgcctttatagaggtgaattgtctgtgttctcttaaagtaggcggtggtccttgggatgtggggagatggaagcacgaagtgggactgtgcttctttggtaagatttccagacagcatttcatttcggtttggattatactcaggctgactcaaaatgccaggcaagaatgtcagggggagaaagagagctgatgaagacagcaaatacactggggcaggtgaaacagccagtgtcttaggatgtctcagggtgcaagaaaaagggctgtgtcctggccaagcacttgctctttctcaacacacaaaagagatcaggtgccctgaagccttcagtggaagctgcacacaacaaaattaatgaaaccgaaaggcagctccctttgatagcttgacatgtttgcatacagcattatcatctcggcgccagtgaggctattctgaactactggagggtctggcagacacaggtaacccgcctggccctacagcacctgcctcttctgttgcccctgagacatcatctctaagtagatgttaggttctgtcaacatctcatctgttggttagaggagttaaggaggccccttcctcggtttgtctggttcctggtttggtggagcatcagggggatgtctgggaaaacctgacaactggctgtgagttgaatcatgagaaaagcacaattccagaattggctgtattgtctgcctttcaggctctcatacttggcctttttttgagacggagtctcactctgttgcccagactgcagtggtgcgatatcagctcactgcaacctccatggttcaagtgattctcctgcctcagccttcctagtagccgggattactagtgtgcatcactacacctggctaatctctagtagagacagggtttcaccacgttggccaggctggtctcgaactcctgacctcaggtgatccacccacctcagcttcccaaagtgctaggattacaggcacctggccggcatttttgttcctgcaggtttatctgtggtaatttttttacaccaggttttctggtgccttcatttttggcaagaaagggtcctaacacttactgagtgcttgctgtgtactcaaaggctgcgagcagcttctaacacacatgagctcatacaatcctcatcatccccttgcgggggaaatacccagatgttttcgtttcatagatgaggctcagaggaactaagtgcctggcccaaagtctgacagctggagggagctggaattccagctctgccctctgtgaccccaaaccctgtctttccccactataccggtagttaagtgtgatcccaaagccagcagcacgagtgagcctcacctgggatcttgtcagaaatgcaaattctcgggcttacctgtaacacaaaaaaaatccaaaactctgggggtgagcccagcaggctgcattctgataagccctccaggtgatgctgacccacactcaagttttgacaaccactgaacgatcccctgctgcctctgattccttttaaaataagagaaactggagccccagctcggtgttcctgtgtctgctcctacttcttgggctgtctgttggacagtagctgcccctttgtcctttagatcattaacactcacccacccacaccccagctctcacctgtttggccaggcagcctctgcaaggtttggggtctaagattaactcataaaagaatgacacatctttcatatatgtaatacatacctccagtgactaaacaagaaacttcagattgcaagatccctctctacatcttccaacttttctgaatcatgcccagtctcacctgatccaaatatatgattgattgtattatttggctgtcaacaggctccgaaatgtacaagccctcctcagggtcctatgcacttaagatggtcttgaaacctgcctatttcaccacctacaactagtgaggactcaagccaaatttgaaaaacagcaattttggttcttggcataaactgtttgctatgatgtgatacaaaatgaggccatgggtaaaagagggcccgtccctcctaacaaactaggtattttgactcaattatggggactgaaagtactgcatgacttgtatgatctgttgctaactcaggtgtctaatcagcaagcctttcggatatattaataagctactaatcgtgtctgtgtctgtgtcagtgtctctctgtaacatgacctctcttctcttcctcctcctgctttcctttgttcagagaagcaacagaaaactcacccattctggatgggtctgagtctccacctcaccaaagtactgatgaatagaggtaccgtaaggggagttttgttcctactgcccatgagtctgtggtcccacatgtgttgcttttgtccatgtcatcatttccacaaggatacatctgaatgctgtatttatgccttatttctagatacatggggaactggaactatgtttttagctgaaggttcttacatcaaaattatgatattcctaacactgcttcccagaaaagacccccagagtatgttttgttttgagacagagtcttgttctgttgcccaggctggagtgcagtggcatgatctcggctcactgcaacctctgcctcccaggttcaagcgattctcctggctccctagtagctacaggtgcatgcgtggctaatttttgtatttttagtagacacggggttttgccatgttggccaggatagtctcaaactcctgactttaagctttaagtgatctgtgcgcctggccccaaagtatattttagactcaccatgttctatctacattcaaagatttgtagacattttactgtgagtaatcagtgtccctgaaaagaacagcatcactgcaatgtaagtttcaaagcaccaagggccgactcagtggctccagaagcacccccagcattcttgagtaacagctgtgctgagtaccaaaagctatgagcactgcttttccaaatgtccataagccaacatttttatcactaccaccatcacctgggagctcgttagaaagctagtctcccgggcaccaccctggcctactgaacctaatgtgcatttaacaagattcacgtcgaaatctgcaaagcacaggggcagataacagtaccacctggtctggttcctagccccaggacccttacagtctaactgggacacaagggcttgaaatcaaattgcctatcagaagatatacaaggagcatgagaaactgctacacttatgtattaagtgctctaagacttagaaacaaaatgcaatgctgagaggattcagaaatgagggggtcactttcgagttcacggagatgttatgtgagcctggctcagaagcctgccgtgggaggagggggcttagacaggtggagacagagaccatcccaagtgcaaaaacatggatgcacagataagggtgaggggtggttaacagtagagagtcttgtttcctgtagagaaaaaactggacttttgaaaagtaagttaggacaatattgcaaagttgacagatggggaattaggacagggacttaggctttggaaggaaggtagaccccctcccccagccccagtgccagggtgatgtcatgagagcagtatttttgaagtaggaagaatggcctttttctcccccggtatgggagggcgatcatctgctaaaggtgatggagatagggctgacagccagaagtagaattaaccaggtttgaaagagctgcggtgggaatgtaggcactgcttgaaatacctacatacatacacgaatacatacacgagttcatgctcatgcatacatgtgcacatgcagggacacacatacattatactgagcaacagcaccttcccagaccaggtaagacaggatgcctctagagggcctcatcccctatcctctggccttgtgaccaactgcgggactgttcaacaaccccagtatgtgccaccagttggttctgtaagttagttatacgtttaaaaaaataattcagtttgaaattcctccctcccagcagccccacctccctatgccaagcagttataaaccacaaaaccctgtgagatgtgggtgaatttgccatctgtctggtatcagacggccctggcttagccagtaccctttgcaggccacacatctctgagcatagccctgggaaagggcattcttgcagtggaaagcccccacagattctgaagtcaccacttgctgtgacccagactgcccagggctaagctgctcttctgggtcacagttgagagagcacacctagatcttcatcctgccccagctcatgttccagtgaatgactgacttaggtttttaggtttttactagggcaactatttagtggccccatttgtattatttgtgaagaataaatgcttcctaagggtctctttcgtagcacatggcattccttgactactaccggaaaattgaatttgtactgaaaggcaaaggcttagctgagcagccagaacaagggtctcttccccagacttgagaataaaagaccaatacatgaagcaacatttatagctttaaaaataccttacgtacttcaataactatgtggaagcactaagaaagattctgtataaaacatcgcaagtttggaaaaaatacatctttacatcttttcctccagcttcattttctcagaggcaggagcaggccagtggtttccatactgcggctcctctaggagccacctgagaaccaaaccaccaatccagcatctcccaccccatcatccagatcctcccgatgccctctcatatgtgggttctgtgacccagaagcctccataatgaaccacaggagaacaccatgggccagccaacagttaggctcttcacataccaaataaaccaccacaggaacccttaacctcatctactgcctgatccaaacatcactgctttgaactcaatggtctttcttgagcctttatgatcaatacatagtgcacttttagtccctctgaagcagattatgttgtcacaattatgactcaactttaatagtttcaaccagaaactgtttaggatccaacatacaagagagtcaactacatttcataatattagcccatttaagagtatttttcaaagtgtgttctgtggatgttaataggtgatactgttccagaagttctgtggcaaactaatccaggacttctcagaacctttaatatatgtttcatatacatttacatttcaggcctctgaaaggcagaatcctcaaatttatttatccatggaagctttttttcccctcagagcaactcacaggactactttgggaaacactggctaagtgttcctaagatctcatgaaaccccttagggaagttttatcccaaacagacccagatcatgtttgtgttagaaacaaaaatttcatcaacagtttaagaaactacttacatgtgccagtattcgttagttacatatgaaaaactcagttcaacaagcgtaagcaaacaaaagcgtgtaccagccgatgtcactggagcccgggctggctgggtctccttccatctctagctctgcttcctcctcctgttaacctagttctcaggaggaaatgacatccttgtggtttcaaagctgctcaggcacgtggccacctttgaaccagggattttgatcgggggactctcattggcccggccccgttgggttccttgtcccctggcccccacgggagtgaggatggcgccatggtggagagcaccaccaggaccacgtggagttagggagagactgtccccctaagaaaaacataggacccctgcaaggcccaaccacctctcccattagaagtttttcagtcaggcacaatgtcaaaagtcagcttagggtggagacaaagtttgcaggacaggtgtcccagaatcatccacataccacctacatatagtaatacccatggccagtgtcataatcaagggccttttcttactttgcttctgaagctggtttatttctggtgctccaaacacaggactctcattaaaatccaccagtatatgcacagatgccttgtgattttccagctttcatggattttaaggccagatgagaaacatttacaacatccagttgttcctagagaggttagcaaatgaaatagaaagctggggatgactgatgattctcaatcgtgaagctgtgtttggtaccgaaatgctcctaaaactcacccgctctgaactactttgggttagggtcccttcctgccacccatccctcaccactccccatggggagatcagttgcaggagaggaattcaaagggctcattcaggatcattgaagagaggctgtttttccgaatcatgatccctagtaatgactattggcttccacatatctatgattgcttcttaagatttaagaattacttctacccaacctaaatggtgatacctccctaaaatacttaaaaaaaaaaaaaaaagccttttattttcttctatagactttcctattttaaatgaacacacttttataatcacaaaacaatgcatgttatttagaataaagcaaagtcatcattgattttttttaaacttttaaaacacaattcaaaataccaccgcagtttcactatagggaaaactcacattttgaatgttcttccaggacagaataaaaatttcctagtgacatctgttagccctggggtctcacggaggacaacccgggcagctgtcgtgtgggaaaagtcccctgaggaaagcccagaggttctggctttggctgcatctgagaatcacctggtggggagctttgacagttctcagcgctcaaacacaccccaaatcaattgggcccaggcatgagtatttctgggagttcccaggtgctccccggatgcagccacgctgaagaaccaccgcactgagtaagttaccttccattttcctccttcacaaatgctctaggtttcaggcggcccctttgtgtggattctgggggccttctgtacacacagcactgttgagggtctcaggcctcactgctccgaacaggaaagactcgtgattagcacagggccctgtcaaggtgaacatatccttctcagtgcaggcctggctgaacccatcctcctccactaactaactgtctcatctcctttcttgggcctcccacaggagctacaatgatagctgtttcctggattcctccctctatccagaactagctgatgtccagtggtacgggcaggaaaaagccaagcccgggaccctcgtgtgagccagcccggcctaatctgaccgcctcaacgccattctgagatcacctcactgcctctcatttgccttacccagacgcaccgtcaccctgcaccagctttggccctcagcactttttttctcctgtctccgcattccctcccccttgaaaacctgactgaggagacattctggaaggttccggtcccactgtgtgtcccctggcgctcttgcccatagagagccagacaccaatcctcaatggcaccttggtggcttccctctgccatgacagcccctaggccaggaaccatcaggggggccagccggcatccaattcctgcggataagtagcgttgggagagaacgggaaaggggacttgagttacagggtgacccagaaagacgattcagctgtgtccagcctgccacccatacgtaggccaaccaagcacttcatgaagaggaggcctcgtggcatattcagtttacacctgaaatattccttgatgggacagcttgtggggatggctatgggggaaggggaggttgagaaaggaagttctcgacaccagaaatgcatcggaggaccacaatcagttctatgctgccaaagattaaaaataaataaaaacataaaaaattaagaggggccaagaggaagacattctttctgcaaggaaatttcttttaaattctgaactgctactacacacaagtgaaagtcaaccctatgtaaactggtgtcctctctctagccctctcccttactggcccacttctctctccgtagagagcctgaaaaactgccccaatgccacggtaaaggcgaggaagtcttggctggcgttgctgactcacagtcgccatccatctggacacaaagagagacctgtgggagtcgtagagggtactgttagccccggtccatgcagggggttcagccgagcccaagactcaaagctgctttcctttcaggatttgtagtaacgtaaggtgataatggccaaaagtggttctctctcattaaaccaaccagtaaaagcgtatcctatttttttgcacaaggtgtttcattttcgtttttatgggaaaccaagggaaaagcacattgcgatccattcagtgtttaactgtcgtggctcattttctgttcgttagcacttgtgtgacaaaagagctcagatccgacttctcctatgtgtcacttattccaagaacccaactatgcccttaggtagaaagatttgactcgtgtgtctactagccaacaggcagagcagggttgaaaaaaatatcagctcccaaagggcccatgtgtctacatcatcagttactgtcatgcaccacatttgtgtgcagataccaaaagaggaggaaagaagaaaaaaattaatgtgtgggagctgcacgtttacatgttttgagctatgcttcaaacacaactggaaagccatcaatcttcaaaggcctcaaaaatacttttatagtaacaagtgcacgactttagttgggttattcaagatggcacaaaaaggtttccgcagaggtggtatgctgtgcttttggcgcaagtggtggggggatgggggtgggggtggaatttttttctcactctaatgacttcctattggaaaggcattgacagccagggacaggagccagggtgggggtagttttgtgggaaagcagaactgaagttagcttaagcataaaaacaaagaaaaatcttcgcttttcatgtatgtggaatccaagaataaccataggctctaccagaccagaagggtaaggatggacactaaaatgaaacaaataccaaggtattccttctgctgcagcctggagaccaccgagagtcgagctggggcacacacacacctggccgggacccggcagggacaaggcgggccgtggcctcctccaccaagtctctctagacaattcagggcctgctttccccagctccatgcatggctggactggtgattccagggtgcagaagggattcatattcccagaacgctttaagtgtacacctgcaggataaagagataccggttacattattaaatgattctagggattcactgggggatatttttgttgcttttactttcatggttagagctacaaagaacagtgattttttttttttctcccttccccattcagaaacattatacattgggccatttttctttctcccaaagaagattcatggatagtcagactgaactgtgtgcaacaggaaaagtcaaaagggaaaaggtagctgatgaggttacatggttacatgttctacatcatgcagagtagcttgaaatctagtctggagaaaactggatcaagattctagcccactggagttgcaaggaatgagaggcaaaaattctaaagatttgggttatattttcaacttgggggacagagagaaatggagagcaggaattacagttccaacaaacatcatgatagtctggtagtcaagacagagattaagtaaaacaggttttactgtttagctgagttcagttaatacaaaatgtacataaaacgttagtcctttgagactgacatgattaatgatcagtgtggtgggaaatgatgtagttattgtacacaagcacttgcaaactctttatccctatttctttaaaacaaaataaggtgaaatacgaagtccttggtctgatataaagcccctattggattcttcggatgcgtaaaagaaattgcctgtttcagccagaagactggtgaaaacacatacatcagactatgttgtgagccaggttgattttttattttattatatgcaggtgagtgttgaaactgttaaaattccaatttgttttcattcagtattagtttagttctaaatatagcaaaccccatccaggtgctatcagatgaccagttactgcttagttaactaggtgtaaagttttacatatacattaatgtcaatagtttattacaagttgtgtaaaatggactctagtttaataatgggggaaaaaagattaggttgctcctgaaactgactgtagagcatgtaaaatgattttactggattctgttcaactgtaatcaatgaaaaagatgtacgttgtagacaaagttgcagaattaaaaaaagaaatctgcttttaatttattctttttgtattaagaatttgtatagtatctttacattttgcaaaacagtgttgtcaacacttattaaagcattttcaaaatgaaaagatcccagctgcctcctggagattttgttcctttgtctgtcagcgataaatgcttgcgtgtgcactgggaatctgtaattcaggtgcttgtgtcctcagtgggctcctttattaaagtcaatctatagatggcatttttatgagcttgctagatgacacagagaagcttggtttgttcagctgaggtgaattccctcttattctagtttccttctgttaactgtgcaagataatattgtctaaattatgtattcctgctactacaaaaaaggacttgagattagaggtcaatctttatgaggatactatctcagcctctgcatcactattcactgcaaacggctccctgtgtgtaatatgtgccagcatgtgtactgtccctgcaagacagtccacggcaggagcaatgaaggaagctaggctttgagggatcgtctttagtctctccatgttgtccctcattccatgtaggatgcagagggtcactcacacaggctgctcaggctctctgtgactaccattaatcctctgtgctcacactgcagctcaaaccctgccactgactctctaaatcacatcacgagagccaagcgcctatggggactgcaagtacaaagagtccctgacttacggatgaaatggtgactgactgacttgagtagtgactgctgcaatcgaatccctggccccctaacttaataggcatctcctcctagcaaaactggaagtctggcctccaatagcatccctgcatgaaaaactcctggatgggaagccttacagaagccttggccactagagccagttgatgctgccgaaaaggaaaacaatccactgagaatcacatctggaagtgagcccatcgagagagtgttctctacttcctacaccctaaaaactgcctgtgggagagcctgaagcctcctctccttggggaagcaaccaggccatctcaaaatcatctacacttgaaaaaagacaaagggccctcacgtaagtcttttacatgtaaatatgtcacagctcaggaaattagcgtatcatcttctcattaagctctaccacatgaaagcaactggtagataggaagatcctcttcccatttctttcccactgcttcctacttttcacctcttcatctatcaatctgtttatctatctgccctttcattgtgccaaaaaaggtgattccgaacatttaattattagagaacacaaagtgaacaccccactcctggtagaaagtattacaaacagccagctctttattttcccaggataccatttcaaaaaggctctatgtaaaactctctaaaaagaggaatatgaagtcaccactgatgagggccagcaggcagacaatgggtctccaacaaagtcatttcactgcacatttggtgcagagttccagttcttaaaagcttactctcatggacgagacaaacaggcacacaaccacatttatggggaaaggaggacactagcattaaacaggaggaagagattaaaattattcccaaggataagagatcaacagggcatctctcattggttacctgagttgagtggtcagagatggcagagacaaagtagaagagctgcagaggtataacctttatgccttgcacaaagtcatgctcccagcaaagtcgatacgtactccagcaaagctgaagaacctgcactgcattcagaagaataacacagtgtggagagtaatttcaagagcccataggattataatggcaccaagattgattttttaaatcagaaacccatttctatcttcataaatttttatccccacgagctaattgttttctccttcatttatccattttctctcaaacccactccaattatgctttcacccctccccactctactaaacccactcttgccaaggtcaacgatgactccctgcaatgccaaatccaatggttaattctctgttctcatctaatatcacttgccagccacactttggagtgtgaagaagtgggacacttcactgaaacactttcttcactgggatgtcaggatgccacattgtcctggttttccacctggtatcgtagtccagggctctccttttcaatctccttggtagtttttcttccctggcttcttggcattggtgtccccgggctcagtccttagactccttccctttattattgacaattattccttaaagttcccatctactctcatggctttaaatgccatctttatgctgatgagactgatatttatccctatatcctagacctcctctctaaaagttgtacattccactgcctacccaatatccccacgtggatgtctaatgtgctaacatgtcctgaactaaactcttgactgtcccctccaaacctcaccaatgaatggccctccccagctcagttacaggcaactccaggccttccagtgttcaggccaaaaatctgggaatcatccaagctttctttttcatcagctttcctttcctcacacctcacatctgcacaaacaaatcagatgcaaattccctgcccttataagacttaattacactggaagtagagggggccaatagaaagtaaattagataacataatagataagaaagcaggatagtggaagatttagcctatgacagaaagaggaacagctttttctccaaatcaagtaagacaagatgctggtagatttggaggtagaaagaggccttaagattgcctccatattcaagctgtatgagaagggtaggttaggccaccctccaagtgagataaaaaggaggcagcagggtaggatcaggatagagcagaggcatcaggagagctatggcagggaggatccagctgacattggatgcttagattgtgaatttcctccagggcagctactatcatgtcagagcatgggaggagagaggttggaatgactctggcttggggttgtcagcaggtgtggcaggacaacaaaaacatgtgagagtaaaagggactggaaggtgactgaaatgatggtaatgggatccagactgactaaaaagaaaagggaagctgagaaggtgctattaagtaggagaaaacagactgattggacataggtcttgaggagactgaggaacagcagggtaggaatgaaggagggagcaaagcaaggtcttcatgaccagggtgtaggtaaaacatcagtttcccctaatctcgcagctatccccacgggggtgaatcacatcatctagggagggatccctatgttgtattgaggaaagctagtgaaaaatccacctgagcttgggattgcgtagaagaggacctgggtctcatggctcttttccaggagctgaaaacctggttgcctattatatctcggaccaagaccatagcaattattctaagagagatgattgaacaaacaactgtcaacagatagtgaagaggcaggaggcaaaaaggggactctcaggtatcacagagataactgcaataggaagccgccacgcttagggctgggaaccagaggcaaggctgggatcattaaaatgtggaagcttttccaggagctgggagtgaaacctctcaggcgtggacaccactctcctggtaactggtacctcagaaatgtggggactccacagagctcggattcaaacctctgaagaggcgccaccggctgacggtgcggtgatctttgagtggagagatgaagctggttctacaagtgtggaaaaccgcaccctggaacccactattccttcaggagtgaacagccactgctcagcttctggaaaaccacggctgtgccatcgttgttagaaacagaaagcaaatagaaggggggagctcccttcttcccgcctccaggttccagtctctcgtgtccaatcctggtataccctaacaaaaagctctccagcaaaggaaagatgtggtttgcagagtctcatgacaaagcagagtatgaagatgtgtctggagctgagacaacagcctcacaaccagcacccctactgaccagaaattggacctttatcctgagtcctggctagaaattcctaatcaaaggatgaactaacaggttctaaaatctcaaagagacctctaaaatctatgctataatatttaagacaaactaatttttagctttttaatttttaaaaaactctataaaggacaaaaacacaagcacttttttttttggcccacgttagtgtaacgtgagttgccatctcagacggaactgtagtaataacaagtcaaagcatatcaagctgcttttcccaaaatgatgaaaccagagtcatgtattttctgaagtatctttcacatctataacagatactcagaagagagtttaattctctcaaagtctcttcttactctgatggagatttggagagaacacaagaggaatcagagctaaatgcttttgtccaataaattgagtgattcagaatcttgatgacagggcagaagaactccttttggcatctgctccagtacctggttgtccttgaggtgcttttaacatcagttccatctgtggcttttctgtaactgaaatcacaatgtaccaacatccacagaaccacttcaagtaaatgctctcacatctattttatcttaggaggatgtggcaaagtccgattttattccagtcgaaatgaacaaagacctcagcaccatggcacacttgccacaagtcacttgatgattttgaaggtcaagaagtttgagtaatgcatacattgcttggggactgagttcagcagaatataatggaaacccaacttacccaatactgttctcatataacatgaggcccacaggaaggcagctgtgatggttaattttgtgtcaacttcactggggaagacggtacccaaatatttggttaaacatcattccaaaggtatctgtgagggtgtttttggatgagattaacatgtgaattggtagaccgagtaaacacatggcccttctcagtgcatatgggcatcattcaatccactggtggcctgaatagatgaaaaagatggggtaaaggagaattagctctctctacgctccagtccacctgcagactggaattacaccatcagctctcctggttctcaggcctttggacttagactagaatttacaccattgattctcttggttctcaggcctttggattcagacgggagctacaccaccaactttcctgggtctccagcttgcggggtacagatcactggacttagcctccataactgtttcaaccaattccttataataaatctctctccctcccccgcaacaactttctctttctccctatctcctatctcttctgtttttctgtagaaccttaaaaaagcagttcatgttttatacaaaatgatttcatgatgccataaaaaaaaaaaaaaaaaaagaaaagccaagctttatcttctgctcggccatctttagcacatcttcattgtcaagattgcaggatggccaccaagcatctacgcatcatgatcacaggcaaaggacaaagtatgtatgtcagctaagtctgtctctttctcttagtaaagcaacaggtttccaggcagtcccactcacccacagacttctatccgtatcttcttcgcaggaccatgtcatacgaccaaccctaactgcaaaaggtcctgagaggacaagttgttttaactgtgcatattacagttctaaacaaattagggctctgttagtagagaaggagagagaatgaacattgcgtaagtaactagtagtgtctacaccacacatttatggcacatgaacttgcacatcaaaagaagcaaaacaaaaacagccatatctgaaatgaaataatccaatacaacagttaacaaaaaagtgcaaacattcacataatttcctcttctcacaaatcttacactcttaaacatgccactatgatgacatcattaaacaagaggaagaattgttatttaagcttgacatatgatttgatttttataaaatctatcgggcaaagatagttggcaaaggttatgtcaatatctgagtcagtcataagattatttctccaatgcataaaaggtaacctggcacaaagggtggccaccaagtgggaggcttatttgcaatacagatatctagccagaatacagaaagtactataaatcagtcagaaaaaagcaggcaattcagtaggggaaaaatggacaaaagtaagcattgaacaggagcttcacaaaagataacatccaaatggccattaaacatatgaaaaaaggtactcaactatattagccattagagaaatgcaaattaaagccacaacgtgataccattatgactaccagaagggctaaaatgaaaatgacagaggatatatcaagtgtggcaaggaggcagagtaactggaactctcaactcctgctgtgggaatgtgttaactggtataaggttttcctttggaaaactctttgacaataactctaatagccaagtttatacataccctatgtcccagaaatttcataccttggtatatattcttgtgaatataaatagagagatgtatattcaccaagaaacacatataaaacatccatgcaaaaaccagaaacaactcacatgtccatcatcagtagaataaattgtgagacacagcatcaagactgaaaaaccacaactacacacattggggatgagtaagtatcagaacccctaagctgagccaaagaagtcaagcacatactgtttgattccatttataaacaggcaaattgttaaacacaggcaaacggggttcttttttggaatgacgaaagtgttctaagactgtggtgatggttgtgtaactgtgaatatactgacaacctttgtacactttaaatgggtacaactgatggtatgtgaattacacgccgatattttttaaaaattatgatgttagaaattaggaccatggctatgactagaagaggacatgaagagatttctggggagttaataacaattaccttttctgattggggcgctagttactttgtttactttgtgaaatgtttactttgtgaaaaacctatcatgatgtgatactctagtaatttttctgtatgtatgttatactgccaataagaaaatttacattaaaagaaatgtaatttagcactgagtcttaggaaataattttcaaagggccaagccactgtcctctcaacagacacttgacgcgtaacactagactccttgcaactattcttgccccaaacctatcttatacttaattaatttattacttatttttgagacacggtctcactctgtcacccaggctggaacgcagcagtgtgatcactgctcactacagcctcgacctcctgggctcacacaatccttccacctcaacccaagtagctgggactacacgtgcgcgccaccacacctggctaatttttgtattttttgtagagatgaggtctcaccatgttgcccaggctggcctcaaactcctgagctcaagtgatctgcccgccttggcttcgcagagtgctggcattacaggcgtgagccaccacacccagccaaacctatctcgtactttaactgacctcccatttattttgtaataccttgtttaatcttgctttatccaacaatgtgcaaccagcccaaggtgatcagctatacatactgccaattttctaacagatggcttacaagtttcttttctcggttcttctatggacgtctcctcattttaaacttaagaattacatattacggcagaagtatttagcattttgaagtactgtaggttctataatctgctaaatttcacactaacaatgagagccaagtgttatctccatattaaaaaaaatcaaaaaagaactatagtccttttgtcctagattcatctaacaggtcatttccttctttaattctactgataattgctttaatcggtggttttccaaacaactccattaaaaagtgggcaaaggacacgaacagacacttcacaaaagaagacatacatgcagccaacaaacacaagaagaaaagctcaacatcactgatcattagagaaatgcaaatcaaaacctcaataagctaccatcccacaccagtcagaatggct

SEQ ID NO: 1142 - DNA, 1741 bp, Homo sapiens
tctgcagccacgagaagcaaagttgacatttctggatcactctccccagacgcgtcacttgcccacaagcgggacacggcagtctcgctgagccagctgtgcagagggacagatggaagaaagctagagatgctgcttcgtgggcgctgaagttgcagaacttgggctggttttctttcttcccatcccccctcctcctgacaaaccacatcttgactcagatggtcgaaagaaaaactctttcagttatttgatatttgggaaccctccaggagaccataacttatttttgagggaggctccttctctccctttgctgggaacacacacacacacacacacacacacacacacacacacacacacacacacacacacacagctgtacaccatggtggttcaggctgcagtggctccgaatagatcccaaagacttttactgaaaattccttatggatctctgagaaggcgcagcgttgaaaggatgacggagggccgccgatgtcaagtacatcttcttgatgacaggaagctggaactcctagtacagcccaagctgttggccaaggagcttcttgaccttgtggcttctcacttcaatctgaaggaaaaggagtactttggaatagcattcacagatgaaacgggacacttaaactggcttcagctagatcgaagagtattggaacatgacttccctaaaaagtcaggacccgtggttttatacttttgtgtcaggttctatatagaaagcatttcatacctgaaggataatgctaccattgagcttttctttctgaacgcgaagtcctgcatctacaaggagcttattgacgttgacagcgaagtggtgtttgaattagcttcctatattttacaggaggcaaagggagatttttctagcaatgaagttgtgaggagtgacttgaagaagctgccagcccttcccacccaagccctgaaggagcacccttccctggcctactgtgaagacagagtcattgagcactacaagaaactgaacggtcagacaagaggtcaagcaatcgtaaactacatgagcatcgtggagtctctcccaacctacggggttcactattatgcagtgaaggacaagcagggcataccatggtggctgggcctgagctacaaagggatcttccagtatgactaccatgataaagtgaagccaagaaagatattccaatggagacagttggaaaacctgtacttcagagaaaagaagttttccgtggaagttcatgacccacgcagggcttcagtgacaaggaggacgtttgggcacagcggcattgcagtgcacacgtggtatgcatgtccggcattgatcaagtccatctgggctatggccataagccaacaccagttctatctggacagaaagcagagtaagtccaaaatccatgcagcacgcagcctgagtgagatcgccatcgacctgaccgagacggggacgctgaagacctcgaagctggccaacatgggtagcaaggggaagatcatcagcggcagcagcggcagcctgctgtcttcaggtaggcagaggccagctggagggacgccccctgagcatggctgggaccccagaggggacccaggaaggtggggagagctgcagctggggagactgcagggcaagctgctccaaagctggctttgctttccagaccaaggttgggatccaaatgcgaatctgagaaaactgctcccaggaatcaaa

SEQ ID NO: 1143 - protein, 450 aa, Homo sapiens
MVVQAAVAPNRSQRLLLKIPYGSLRRRSVERMTEGRRCQVHLLDDRKLELLVQPKLLAKELLDLVASHFNLKEKEYFGIAFTDETGHLNWLQLDRRVLEHDFPKKSGPVVLYFCVRFYIESISYLKDNATIELFFLNAKSCIYKELIDVDSEVVFELASYILQEAKGDFSSNEVVRSDLKKLPALPTQALKEHPSLAYCEDRVIEHYKKLNGQTRGQAIVNYMSIVESLPTYGVHYYAVKDKQGIPWWLGLSYKGIFQYDYHDKVKPRKIFQWRQLENLYFREKKFSVEVHDPRRASVTRRTFGHSGIAVHTWYACPALIKSIWAMAISQHQFYLDRKQSKSKIHAARSLSEIAIDLTETGTLKTSKLANMGSKGKIISGSSGSLLSSGRQRPAGGTPPEHGWDPRGDPGRWGELQLGRLQGKLLQSWLCFPDQGWDPNANLRKLLPGIK

SEQ ID NO: 1144 - DNA, 5020 bp, Homo sapiens
tctgcagccacgagaagcaaagttgacatttctggatcactctccccagacgcgtcacttgcccacaagcgggacacggcagtctcgctgagccagctgtgcagagggacagatggaagaaagctagagatgctgcttcgtgggcgctgaagttgcagaacttgggctggttttctttcttcccatcccccctcctcctgacaaaccacatcttgactcagatggtcgaaagaaaaactctttcagttatttgatatttgggaaccctccaggagaccataacttatttttgagggaggctccttctctccctttgctgggaacacacacacacacacacacacacacacacacacacacacacacacacacacacacacagctgtacaccatggtggttcaggctgcagtggctccgaatagatcccaaagacttttactgaaaattccttatggatctctgagaaggcgcagcgttgaaaggatgacggagggccgccgatgtcaagtacatcttcttgatgacaggaagctggaactcctagtacagcccaagctgttggccaaggagcttcttgaccttgtggcttctcacttcaatctgaaggaaaaggagtactttggaatagcattcacagatgaaacgggacacttaaactggcttcagctagatcgaagagtattggaacatgacttccctaaaaagtcaggacccgtggttttatacttttgtgtcaggttctatatagaaagcatttcatacctgaaggataatgctaccattgagcttttctttctgaacgcgaagtcctgcatctacaaggagcttattgacgttgacagcgaagtggtgtttgaattagcttcctatattttacaggaggcaaagggagatttttctagcaatgaagttgtgaggagtgacttgaagaagctgccagcccttcccacccaagccctgaaggagcacccttccctggcctactgtgaagacagagtcattgagcactacaagaaactgaacggtcagacaagaggtcaagcaatcgtaaactacatgagcatcgtggagtctctcccaacctacggggttcactattatgcagtgaaggacaagcagggcataccatggtggctgggcctgagctacaaagggatcttccagtatgactaccatgataaagtgaagccaagaaagatattccaatggagacagttggaaaacctgtacttcagagaaaagaagttttccgtggaagttcatgacccacgcagggcttcagtgacaaggaggacgtttgggcacagcggcattgcagtgcacacgtggtatgcatgtccggcattgatcaagtccatctgggctatggccataagccaacaccagttctatctggacagaaagcagagtaagtccaaaatccatgcagcacgcagcctgagtgagatcgccatcgacctgaccgagacggggacgctgaagacctcgaagctggccaacatgggtagcaaggggaagatcatcagcggcagcagcggcagcctgctgtcttcaggttctcaggaatcagatagctcgcagtcggccaagaaggacatgctggctgccttgaagtccaggcaggaagctctggaggaaaccctgcgtcagaggctggaggaactgaagaagctgtgtctccgagaagctgagctcacgggcaagctgccagtagaatatcccctggatccaggggaggaaccacccattgttcggagaagaataggaacagccttcaaactggatgaacagaaaatcctgcccaaaggagaggaagctgagctggaacgcctggaacgagagtttgccattcagtcccagattacggaggccgcccgccgcctagccagtgaccccaacgtcagcaaaaaactgaagaaacaaaggaaaacctcgtatctgaatgcactgaagaaactgcaggagattgaaaatgcaatcaatgagaaccgcatcaagtctgggaagaaacccacccagagggcttcgctgatcatagacgatggaaacattgccagtgaagacagctccctctcagatgcccttgttcttgaggatgaagactctcaggttaccagcacaatatcccccctacattctcctcacaagggactccctcctcggccaccgtcgcacaacaggcctcctcctccccagtccctggagggactccgacagatgcactatcaccgcaacgactatgacaagtcacccatcaagcccaaaatgtggagtgagtcctctttagatgaaccctatgagaaggtcaagaagcgctcctctcacagccattccagcagccacaagcgcttccccagcacaggaagctgtgcggaagccggcggaggaagcaactccttgcagaacagccccatccgcggcctcccgcactggaactcccagtccagcatgccgtccacgccagacctgcgggtccggagtccccactacgtccattccacgaggtcggtggacatcagccccacccgactgcacagcctcgcactgcactttaggcaccggagctccagcctggagtcccagggcaagctcctgggctcggaaaacgacaccgggagccccgacttctacaccccgcggactcgtagcagcaacggctcagaccccatggacgactgctcgtcgtgcaccagccactcgagctcggagcactactacccggcgcagatgaacgccaactactccacgctggccgaggactcgccgtccaaggcgcgccagaggcagaggcagcggcagcgggcggcgggcgcactgggctcagccagctcgggcagcatgcccaacctggcggcgcgcgggggtgcggggggcgcggggggcgcggggggcggtgtgtacctgcacagccagagccagcccagctcgcagtaccgcatcaaggagtacccgctgtacatcgagggcggcgccacgcccgtggtggtgcgcagcctggagagcgaccaggagggccactacagcgtcaaggctcagttcaagacgtccaactcctacacggcgggcggcctgttcaaggagagctggcgcggcggcggcggcgacgagggcgacacgggccgcctgacgccgtcgcgatcgcagatcctgcggactccgtcgctgggccgcgagggcgcccacgacaagggcgcgggccgtgccgccgtctcagacgagctgcgccagtggtaccagcgttccaccgcctcgcacaaggagcacagccgcctgtcgcacaccagctccacctcctcggacagcggctcgcagtacagcacctcctcccagagcaccttcgtggcgcacagcagggtcaccaggatgccccagatgtgcaaggccacgtcagctgccttacctcaaagccagagaagctcgacaccgtcaagtgaaattggagccacccccccaagcagcccccaccacatcctaacctggcagactggagaagcaacagaaaactcacccattctggatgggtctgagtctccacctcaccaaagtactgatgaatagaggagctacaatgatagctgtttcctggattcctccctctatccagaactagctgatgtccagtggtacgggcaggaaaaagccaagcccgggaccctcgtgtgagccagcccggcctaatctgaccgcctcaacgccattctgagatcacctcactgcctctcatttgccttacccagacgcaccgtcaccctgcaccagctttggccctcagcactttttttctcctgtctccgcattccctcccccttgaaaacctgactgaggagacattctggaaggttccggtcccactgtgtgtcccctggcgctcttgcccatagagagccagacaccaatcctcaatggcaccttggtggcttccctctgccatgacagcccctaggccaggaaccatcaggggggccagccggcatccaattcctgcggataagtagcgttgggagagaacgggaaaggggacttgagttacagggtgacccagaaagacgattcagctgtgtccagcctgccacccatacgtaggccaaccaagcacttcatgaagaggaggcctcgtggcatattcagtttacacctgaaatattccttgatgggacagcttgtggggatggctatgggggaaggggaggttgagaaaggaagttctcgacaccagaaatgcatcggaggaccacaatcagttctatgctgccaaagattaaaaataaataaaaacataaaaaattaagaggggccaagaggaagacattctttctgcaaggaaatttcttttaaattctgaactgctactacacacaagtgaaagtcaaccctatgtaaactggtgtcctctctctagccctctcccttactggcccacttctctctccgtagagagcctgaaaaactgccccaatgccacggtaaaggcgaggaagtcttggctggcgttgctgactcacagtcgccatccatctggacacaaagagagacctgtgggagtcgtagagggtactgttagccccggtccatgcagggggttcagccgagcccaagactcaaagctgctttcctttcaggatttgtagtaacgtaaggtgataatggccaaaagtggttctctctcattaaaccaaccagtaaaagcgtatcctatttttttgcacaaggtgtttcattttcgtttttatgggaaaccaagggaaaagcacattgcgatccattcagtgtttaactgtcgtggctcattttctgttcgttagcacttgtgtgacaaaagagctcagatccgacttctcctatgtgtcacttattccaagaacccaactatgcccttaggtagaaagatttgactcgtgtgtctactagccaacaggcagagcagggttgaaaaaaatatcagctcccaaagggcccatgtgtctacatcatcagttactgtcatgcaccacatttgtgtgcagataccaaaagaggagg

SEQ ID NO: 1145 - protein, 1053 aa, Homo sapiens
MVVQAAVAPNRSQRLLLKIPYGSLRRRSVERMTEGRRCQVHLLDDRKLELLVQPKLLAKELLDLVASHFNLKEKEYFGIAFTDETGHLNWLQLDRRVLEHDFPKKSGPVVLYFCVRFYIESISYLKDNATIELFFLNAKSCIYKELIDVDSEVVFELASYILQEAKGDFSSNEVVRSDLKKLPALPTQALKEHPSLAYCEDRVIEHYKKLNGQTRGQAIVNYMSIVESLPTYGVHYYAVKDKQGIPWWLGLSYKGIFQYDYHDKVKPRKIFQWRQLENLYFREKKFSVEVHDPRRASVTRRTFGHSGIAVHTWYACPALIKSIWAMAISQHQFYLDRKQSKSKIHAARSLSEIAIDLTETGTLKTSKLANMGSKGKIISGSSGSLLSSGSQESDSSQSAKKDMLAALKSRQEALEETLRQRLEELKKLCLREAELTGKLPVEYPLDPGEEPPIVRRRIGTAFKLDEQKILPKGEEAELERLEREFAIQSQITEAARRLASDPNVSKKLKKQRKTSYLNALKKLQEIENAINENRIKSGKKPTQRASLIIDDGNIASEDSSLSDALVLEDEDSQVTSTISPLHSPHKGLPPRPPSHNRPPPPQSLEGLRQMHYHRNDYDKSPIKPKMWSESSLDEPYEKVKKRSSHSHSSSHKRFPSTGSCAEAGGGSNSLQNSPIRGLPHWNSQSSMPSTPDLRVRSPHYVHSTRSVDISPTRLHSLALHFRHRSSSLESQGKLLGSENDTGSPDFYTPRTRSSNGSDPMDDCSSCTSHSSSEHYYPAQMNANYSTLAEDSPSKARQRQRQRQRAAGALGSASSGSMPNLARGAGGAGGAGGGVYLHSQSQPSSQYRIKEYPLYIEGGATPVVVRSLESDQEGHYSVKAQFKTSNSYTAGGLFKESWRGGGGDEGDTGRLTPSRSQILRTPSLGREGAHDKGAGRAAVSDELRQWYQRSTASHKEHSRLSHTSSTSSDSGSQYSTSSQSTFVAHSRVTRMPQMCKATSAALPQSQRSSTPSSEIGATPPSSPHHILTWQTGEATENSPILDGSESPPHQSTDE

SEQ ID NO: 1146 - DNA, 215217 bp, Mus musculus
  misc_feature (1)...(215217): n = A, C, G or T/U
ttgatggaacaacgttcagtgggcaatcgtaactttaaaccaggaaatagacccgcaacccttaccgcgttggtaggttacaactcaagcctcgtggctggtggactgataaaattctatttccttccaaaggggagctgcccggaagtcctggtagggaagctgggagctaggtgggcggtctaggacgcacaaaggagttctgctgcctaaggcgtccaacgcaaccacaacctgaggctttggagagttgggttggacaacctagtgtgagttgagagctattccggtctaagagtgctttgcgcttggttattggggggaggagggagggaagggggaaggacaggaccctgaccactcccctggacggaagcgcaggttgggtcttgtgggtctaagcctctaaaggtgactttgagcctctttcccacctctttctgaaggatcagctgcgagttgaaggagtgagaagaggtaagttgggactttgagacctaaacctggacatacactctggaatcctcggattcttcacctgagaccaccttgggttaataaaagaagcagttgcgggtgtagatgggatgaataatgttcagggacgggattaatttatttttgagaagtttctgccgtcaggagtctccgaccttaaggatgatgagctcaaaaaatacattggtgttcctaagagttggacaccgggaagctagcttcgggagtggcaaactccggcgggtgataaaagtgtgaacctcagagaatactgataagcgaatgactggggccttcagggtcttagatggctctgtactaaacggaggtgtatgggcaaggcgagacgctttagagctaaagaattctctaaaatgtgaaggaaatattctcagactggcagggctcagtcttttgtaacttccaccacgctttccgaatctctgactttcgcccaccattccctcccaccccccacccctgaggcccaataatggcgagagccatttctgcgcttctcccttctagattcttccagatgacctaaagcctcatagttggtgatgtctcccgcgcaaagttagcctctggccccgtcactctattggcggttcctagccctcaccactccctagggaaccacgtgtgggaatttcgctgggatgttaggatcagggagggtgactaaaaatctcagtatgtagttgttttttcggagagtggtgtaagggataggtgggcaatagaagactacggagtggaagatttttttttttttttgaagtcggggttgtaaaggcaaagaccttgagcaattgtgtcttctgtttcctagtcgatagaaccagctctatattcgctctactgcttcccagcttcataaacggtgagttttgtctacctgggcatctccagcttttctgtataggggacatttcgtttgtgttccgtaccaccattgcgcccaaggcccgggaagctcattagcccttgcgccacgcccgtgaaaaagtgcgggtagaccccgcagatcagattgggcggatcttccgctccattcctatagatcatgaaggacctggtttttcttgatatgggccagggaaaccccaccctacgggaacctgtcctggccaggtgtcccaccagaagcccagcgagcttcgtcactcgcattcctgtagattgcagctggtagatccccggcagtccaaacttaactcccagcatttttgggtgtggtacgggcccaaagaaaacctcttcttctctcccccaagaacagatttttttttttttgagagtcttcatataaaagcacaattaaagtacagggtggggtagaccagacgggaccttcgattttgtttttagggtcccccattctcctcacttcaaaaactcttggacgggtaaagcacgagattatgctctaggtagaccaggggattgcaaacctagaaaacaaacaacagctgagaaattggggtgtgagtccagttgtcggggcaaatgggtgttcgggtacgcttgcggtgtgaactttctacggatcacttgtggagggagttgaaggaaaggagggaagggaaccgccccaggggtcctcgtggcgaggtccgtgctcactgggggaggtgtctacctatgcctgggcggggggaggggggagaggcggcgtgaggaagtccagcatgatagctccccctagtcatctcagaactcaggaggtagacacagtgcatccctggggtttgtttggttagccagattagttaatccaggtcccaggacaatgagagaggctgtcttaaaaaccaagggaagnnnnnnnnnnnnnnnnnnnnnnnnnnnnnnnnnnnnnnnnnnnnnnnnnnnnnnnnnnnnnnnnnnnnnnnnnnnnnnnnnnnnnnnnnnnnnnnnnnnnnnnnnnnnnnnnnnnnnnnnnnnnnnnnnnnnnnnnnnnnnnnnnnnnnnnnnnnnnnnnnnnnnnnnnnnnnnnnnnnnnnnnnnnnnnnnnnnnnnnnnnnnnnnnnnnnnnnnnnnnnnnnnnnnnnnnnnnnnnnnnnnnnnnnnnnnnnnnnnnnnnnnnnnnnnnnnnnnnnnnnnnnnnnnnnnnnnnnnnnnnnngttggggaggaaggaggagaaaaaccgaagcgcagaggctggagaggaaatgagaagcacttgagcgaagcctctaactcctctctgcgctctgggttgtcattttttctcattccccacccccttccccccgactcccggctctgaaaagccaggccttgcgggagtctgtccggagttgcaaagtgacctcgtcctcctccgggtgcagtctgttccctccccgccgcccaccttcctcgtttatgcactcgctttagcggcgcagcctcctctgccacctaccccgggttcccgcgtctcctcggagccggggtctccctcttttggtgtgcattgggggggggggggggctaggaggttgtagagaggaaagtgatggcgtggagagaattggaaagcagcaagggtggggtaggggctgttcccaaaaatcgcgcagacgtttggaatcgccggattggaaacatttgccttgtgcagcggaattgaaattgtcaatagtagtttcggagcgagctctagcaaggacgacctttttgttcatttttatcaccctttgaagtaatatcctgtcacttggggctttcttgtgtacactcatcctgccccttttcagaatgtctaacaggatcgagctctggagtttatttatttatttttatgtgcgtgtgtcttggtgaaatcctctttaaaaaaaaaaagcaacggcaggaactgctggatgtgttgttttttttttttttttaaatttttacctggagcggctgaacgggattaggctgggaaagggagaacatttgaggggtgggaagcgattggttttctgtggccggacacaggtccccagcccagtcaatacttgtgttttcttggaagcgctacagcagcggggaaggagtctttagacaccgtgccagttccaatatggcgggctaaggtggcttttaaaaactgaaaataaaggttttgaggtgggaaaaaacccaactgaagtggccacgccttagtttctactctctttggttactccaggagctgctttagcgaattaaataggaaaaaagaggtggggcgaggtattccagttttttccgtggtttatctgtacgaagtccattgctagaggatctagggtggagggttgcctcgggccagaacgagggtatccaagcgcaactgcctggtgtgtgtgcttgtggggtcgtgtacaaactctgcacgtgcagtcggtcgctagggtgtgtttaaagaagccccctcccccacgccaacgtgcgtacgagtctcggaaccagactctgccacgatctgacgtgacaaactgctgacacgaggtgcatcatccacgagggcagagggaatgattaatttcccttttctaggggacgtgttttctttcttcctcagcgttgaatcctgcgtggaatgggcggagcgagtaggtgcttattattattattaaagagactaactgtccagggtactcggttcaatcgggagggctgcgtgcagccaatgggattttgtgtgctggcgagattaggtctgaggcacatttagtgattggcccttgttttgctgcactctccgcaaaggtgagtggtagggggcctagtgggggaagtgcagacctcccaggaaaaggcaaacaaggtcaagccttagagttgccaggtcactttcgattttcccgttctaagcaaggtgagggctggggagtgcattttaggaaggaattgtcccttgcccagtttggccacccactggactgctgtgagtggcgccctccatcggagctaggatgtagtcttggagcgctagggaacagtttgcatctagggtctgggtgcgtatggggaggtcttgaagtggaattcagacagaaaaattggagtcactctgggggttcttaggaaagccagctaacctggacctggaaaaaaaggcactcaaagcaagattgtagtagcctaactagggacagggtccccgacaggggtcgcccgtgtccacgacgcagcaaaggagtagggtagagccgcgggtccagcagaaaagaccctaggagagtgggcgttagtcacgcgccagtcgcttgtggtctctggtgagggctcctctgggaggaatttactccgccagcgactgtgaaagcgcaaggggcgaggtcgggaaggcatttttaaaaaaggcaccggccaggtctgtagttactgcgacaacgtggtcactcggcagtttcaagaagccagagggtgattctattgggtcactcagactctgcaaagtccgggggtccagtctgctcacggtgtcgggtggatggaagataggaattacagaccgcagggagacctgagcgattgctggctggcgggacaggatgcatttcgtcttcccaagcggagcgcgcggcgcgttcccggcactcccagcctgcgcgtaggcacgtcctcggggaacagccgtgggttctgttgaggtggggacaaacacaaaatggttctgtgtttgtaaactgcaatttcaaccatggttccctcccctcttcctccgctgacgaaggcacagctcatctgaaggcttcgaaatctacaattttgcattgggtcggcccatggaagcgaggatccagttaattccaaggaatattccagaggattgtcgcagggcccaagtgttcccccttttattttttattttttccattgggagcggtgggaagaggaggagctgagtgcaagcgaccatcgctacacagaggggatttggggcacttggagtgtagtacctttgcgcattaaatcaaagggagatctcagaagccctgtgagggctcctccttgatgtcagtgccgcatccaggagttcagagtcaacgccaggaaagtctggtttcgggagagtgcccaaactcttgagtttctcttgtggagttttagggatattgaggagttggatggatgaggtaggattccaggaaggagcggctagggacattcgtgcacctttggctcagttcctggacttctagttcactctgttagctccctatttttcccatgtgcctggccaccgcgcggtttgggacacccaacctgtagatgccaacggggaagggaagctctttcttggcccttggttagggaagctactttggatcagtgcccactgatcttagattgtaaaccatggtcagtgcctgccactctcatctctccatcctggtaccatagtcaaaagagctggcctgactaccaaatgaatggattgaagttctagcaggcattgaggggggaaaagggggctagcttcttttctggggagatggtagttgagctgttaggtagtgggaaacagggagagaggctttggtgttttaaaggaattgttggccaggctgtctttaagacaaacatctgtgacttactcccaactgagtattgaatttgcattccttgggccccttcaagccattaaaaagaatgccctttagatctttataacttagctttcctttgagaacctaccaattcacctaacttcaaggggcaggaaaaatgtacacatttcataagtcctttgtacaagctccttctgctgtgggcaagacttattcctaggccagtgtcaagcacagtgtgtagggatggcaactgggcagtctgcatcttagaaaaacagcagcaaccaactattgctctgtaaatagtaacctagacctgtttatgtgacaaatttagggtgcttagaccatgagccccacacagtttggctgagagatattatagaccatattaaaaaacgatggccttttataggcataaataactagttccatgattcttgatacaagaaaacaaaaccccagagattccaagacccctttctttctttctttctttctttctttctttctttctttctttctttctttctttctttctttttttctaatcaaaagctttgctgagtatgttcatcaaattactttcctgcccactctagctgaggtgactttttgttgtttttcttcatagcaataatacccccaaagaactctgggaaggaacaagaagtgttaacattgctatgagctgaacctaaatacatgcgattccatttttcttaatataattaggttttgaatgtaaatccatgggattggggatttaagctcagtgatagagtgcttgcctagcaagcaagcgcaaggccctgggtttggtcctcagctctggaaaaaaaaaaagacaaaacaacaacaacaacaacaaaacaacgacaacaacaaaaaccaaggtaactgaatgtaaatccatacatcaaaactcagaccttctggggctcacatttaagtctacaactttgtgtgcagatgtcggaagagttctgccttcttaaaaaatttgttttgaacaaagaaggtctacagttgggtctaaataccctccagtttggataaaattttctctctgtatttcaggatttggaacttttgtgtttatgtaatactccagggctcaaaagggcgttcatcttgttacaaagcagaagctcataaaggaccagaacgatactgaaaatgtaactcagaatacagtgtatgccccatccccaaatctcacacccatattgctttagtattgactcggtatctctgatctataattgcaagaaaacttaggggaaattatatgttctgccacaaactggaagtgtatcctgtgtattcagtttgataactcaggaatgtctgcctctgtatataaggaaaattgttgataggaggggagaagaaaaagttgggacgtgtggcctctagtttcagagattgatggctctgttgagctgtgtgacctgggatgaatatagttactgagtttgagccttcttgttaacaaaagggcatcagactggagactgactcagtgatgaccaggttaccatgagggaccaggaacaaagagacaaaggctgtgacctgacacactctgtgctaacatgctcaaactatgcttgagcctcacgtccccaaagtgtagtaaaacacaactggccttaggtctgagagcagctggtgagttgtaggtcactgggcagagtgagtgctgtttattgttgagtggtatgagagccacatgaggccttgctttgatttctgctcagagaagtaatgttcagaccgggctttgtgaggcttctttgaatgcagctcatgaagaaattaatgcctgggttgatttgagtgtactcgttgctaggtataaaatggaccttcccagaaagcactgcatgcccctcttccagacctggtggaggtattaagactgccttggctaatgtctgcattgtatcttggtgactagggcatactggtagccagtgagaaagtatcctctatttactggaagactcaaaactttctatcttcagtcctggccactgggctgtagatcctttataagatcagggcattgctttttagattatttatttatttatttatttatttatttatttatttatttattcatttaatgtatgtgagtacactgtggctgtcttcagacacaccagaagagggcatcagatcccattacagatggttgtgatccaccatgtggttgctgggaattgaactcaggacctccggaagagcagttagtactcttcactgctgagccatctctccagccctgtatgttaggtatttaactcagtgatgaaaagtctgattaatgcggacctcatatcttccttagtgcgtaactataatgtatagtgatgttatatctcttttaactcactgctctcccataacttattggctggacagagagaggacagcatcttttcagaagaaagttgacctgacagtgtgcctaccccacactccctgctaagctcaaagttctatcctgagcctctctttacaacacacaatatactttgttttgttttgttttttttcgagacagggtttctctgtgtagctctggctgtcctggaactcacttgtagaccaggctggccttgaactcaaaaatctgcctgcctctgcctctgcctcctgagtgctgggattaaaggcgtgcgccaccatgcccggctaacagacaatatattaaccttcccatttatactgattttcacatagccaacacttacttcttccagaggtcctgaattcaattcccagcaaccacatggtgactcataaccatctgtaatgggatccgatgccctctactggtgtctgaagagagtggctgtatactcacatacataaaataaataataattcttagaaaaaaaaccctgacctacagggagaaagatatctttcagttcattatttcaaatctttgtatctaaagccctcgactcttgttttggggtttgtggttggacaaaacatcatggtagtgggtgtatggtgctgagtctgaacacctcatcatatatatgatacatggtacccagaggaaggaggcaagacaagagacagctcccaagaatgtgaccccagcgatctaattctcttattaagccttgtctgacctgtttccagagcctttccaaatagccccaccagttgagaatcaacctttgaatatatgaacctccccctcatattgaatatatgagccttcccctcatgaggaggggggtcggttcatgtacaaaccatgacaacactagtggcttttcttaagtactatgcaatttttacacactggtgaaagaaagaatacgtcgtgtttttctgactttctgggaaaaaatagtttaaaatagaattttttggtagatcatttgtaaaataatttgtaaattgttagaacccttataagccagagcaaattttgtgttgttagtgtagtggaggagggtggcctggagatttccagtgggaagggatggggcttaaagatcataggacgtttatttattttgtttatcattattttttcactcttaagcacacacacatgtgtgtgtgtgtttgtgtgtgtatcctttataaagcctattcttaaatcagctttcttccctccctttctccctctctctccttccttccttctgtctttttctctttctgttcttccttccgtccttcctttcttcttatctgcttttggcccaactttttctttagtgtgctgtattagttcaacacacatccagtaatcttattgggggaggggaaattaggggctctggaagattcccgtgaaacaccagaaaggcagattgtgatagtggttatcagcgtgccttctgcattgttaaaatgatcattgttaaaatctccttttacttaagataggcttgtttttattctgagagtttttttccccctacagttttattccctgagaaaaagagatatcaggctgtgccttctcagacccctggtaagtgtagtcattttactttcttttcctcacatttgatcaaaactaatacatgcactgaatcatgttactggagtctggaattccaagttcaagttccagcagagtctcttattaagcctatttgaagtgagcaccaggtccctttgacagagagcatccatctctgaggagctggagatgagtttgtgagtgtcatgggttaatatggttgttcaaaaatgttcttaatggaacagctgcatatttaaatatctgctgtttgccagccatggttctattctgttgtagtattcctttttttttttttttttttttgagacaagatctcattctgtggcataggctgctggccttgaactcttgggagacttgttgcttcagctttcttcatcctggaattacagttgggagccagtacagaaactgcttacagttcttcattggagagagggagggagaaggagagggagagagggagagagagagagagagagagagagaaagagagagagagagagagagagagagagagagagagagagagaagagaggagagggaagagaaaaggagagagagagagaggagagaggcaactttgggagttgtctcaggcactcttcccttggtttttaagacagcctctctcattgtcctgggacctggattaactaatctggctaaccaaacaaaccccagggatgcactgtgtctacctcctgagttctgagatgactagggggagctatcatgctggacttcctcatgtttgcattgcaggcactttgctgaaagacatcccctgagccctcccttcaaatatcgtaagtaactaaatggaaaatttattgcggaacttaaaatgtctgattcttttcttttttctttttcattctgatgtctgtctccagaaactaagctacatctcaggcaaatgagaggttttctcccttatttcgtagaagagaaaattgaggccttcttttactctagtgcattctttttcattccctttttgccctatttgagaaggcttccagaacagtctgttttgcagctgacagcccagtacttggaagggttaaaatgtggaggatttcatgttggtaagtggtatcactatgtctagtgtatcaagatggtctgaactaccacccatgggcggaacgtggccaagtacagctatgaatgcggcctgactcaaaacattaccatgtatttgctctccttgtgaggatcagcttttggtatgatagtggatgacagtatgttcttgtgtcatgaggcaggacaatctgtctttggtaaattcctatatgttttctaagttctttcttaagtcagttagggtctttgtatttactccgcataaattttcagtttacttagttaagttcccatgcattcaatgatatgatttattaaaactggatgtatatgcaaatttgtgtcttaaacacacagaagcacccagacttgtgtaaattcccagccagatggtggagctcttcagacttgctttctgatcaagattttaaagagcttgctcccaaggctggtgttggttgcagtgttctggctgtctgcttgaattgctttcgtgtatgtgtctacatggtctgtgtgggttgtgagtggtatatgtatattttattgtgtggatatgtgaacgtgtgtccatgtgtatggaaatgcatgtggcggtcagtggtttgacttcattctcattaatgatgggatttctcactgccccaggaacacactgggtcagctcttcttgctggccaccaagctccgaggacctgcctcttcccctccatagtactgagactatagacctggcctgttatgtaggtacaggggtacaggggatacgaactcatgccctcttatttgcatggcaggcactgtcttggcccagaaatgtttccttattgtaagcttggctgacgtcatctgccaggagctgttgccgagcatctgtctggtttgaagttctcaatttataagcatcagccagcacattggaccctgtctattagacagtacctatgcaatccagagcattgaaagctcttgtaaatgtccccacctgctgaattcttacggctgagcagtcattgtctagttaacgttaattaactactatgtagttgcataatgtgtaatagacatttaatagactcactttataaccattgggatgattctgtaatctattcttttgcatattagtagaacatgagaaatctcatatttggagtttgtgcaatgtgtcagaaccaaggaagccatgtctgtgcaaattgtaaaacttaagtttctccttgttgccaggcttgccggtgcacaactttaaccccaaaactcaagaggcagaggctggtggatatctgagtttgggctagtttggtctacatagtgagaccctgtctcaaaaaaaaagtttttaggttaatcaagtgagggagagaaacattctacatttttgtgagcaggagaaaacacaactcttgaaaggggattgccctctcctctcttctcccttccctactcctcccctcttttctccctcctcctcctcctcctcctcttccttcttcttctcctcctcctcctccttcttctcttctttctttctttctttctttctttctttctttctttctttctttcttccttccttccttccttccttccttccttccttccttcctttctctctctctttctctctctctttctgtctcctcttctatctatctatctatctatctatctatctatctatctatctatctatctatctatctcttctgcttgattctatgtccaaattgcatcctctgtggcttggatgcagattcctggcacaagaaaccctaatttggtactctgatggcaaatcctcttgtatgcaggttaaatttcctaatccaaaaatctgaaatgcaaaatgctgtgaaactgaaaacctttggagaactaaaggggcactgcatgtggaaaagtccacaccatgaagttctgtttcaggttcctagtgttagcagccttgtaaaaaagctgggaatagaggcactaccagagatgccagccagcactaggaccctgtgagttccagaccagtcttggctgaatactcaacagtttttaaaacaacaaaaatcccctgatattgactaacttcaggctgcatgtatcaagtgtttatgtaagaaacacgataaatttcatatcgagacttggctctctatcatcctgttatgtatttgtatcctccaaactctgagaaaaaaaaatccaaagtacaaggcacttttggtcctaagaactttagaaaagggaatctcaacttatagtggtatttaactgagtagttcatagtcttatctttcttttatagtaaataaataacttgtaactaactagctgataaatgaatgatttttttttctttgtttgtttgtttttttcgagagggtttctctgtgtagccctggctgtcctgaggagttcactctgtagaccaggctggctttgaactcagaaatccgcctgcctctgcctcccaagtgctgggattaaaggcgagaactaccactgcctggcatgattttttttaaagacagagtacagcagatcagaatgttgaaatttgttcattctcataggaggctgtactagtcacattcctgttgctgtgataaaattgcctgacaaaaaagcaacctagggagagaaatgggtttttatttgtcttttaatccaatgttatacagtccaccatttaagggaaggaactttgaacagctagtcacaggacagacacagaaaagagcagatggaaatgaatccttgcttgcttgcatgtacgcagctcaaattctccatgcatatacagacacttcaggactcccttgcctatggaatggtgctgcccacagtgtgttgaatcttcttcccacatccattagtttaattaaggtacttttgtatagacaggcccataggccaacctcatgtagacaacccttcactgagattcttttccaaggtaattgattccgagttgtgtcaagtccatgacagaggcttacttttacattttaggttaattatttttgtttgtggtatgtgtgtgtgtgtgtgtgtgtgtgtgtgtgtgtgtgtgtgtacagacaggtgtgagcctgtggagggtagaggctgacaattcagtgtctttctcgctgtattttgaaacaggactcacactgaacctggatctcaccgattctggtagactggctggtcactcagtccagtgataataggcatttcctatttggttttgttttatgtggatcctaggacttgaactcaggaccttgtgcttgcagagcaaacactttattgacggagtcatttccctggcctgggaggctcattttgcaaatgccctgctgtaagcatcggacactgctcactttatagttcctgtagcatacattgtgtgaggattgagttaagggaggcccattaaactcagtgaattagagacaaaatgtgactgtaggaggtagtagctggctccagccctagtattttctcctggaatgcctgctatttcgaacatatcttatttcccagtattggggtatgaatctgattgcaaaaaattagcattttttatgcccaggcagcaatttgtgtcagatttcaatctatttaagggaaaaccaatgaagtctggttgaaaaatggagagtaaattgctgtcttaatcaaggtgagtcaaactctgatcggatggtagatggcaccatcccacggaccttctgccccagacaatcagtgcatctcatttgctgatgggaggaggcagggcttctctgttctcaggaaggctgagagttggctggtgaaagcccgaagcaatgtacttagtcaggcgttattagtagaatgggcctggtgacatggtgcatataaataaaagggatgacgggagagtccgaccgtccatcacttaaagctgctcttcatcttcaaagccatttgcagacgctgtctccttagtctctagcgattcccagctatttgcatggagccttttaggaacaggaaaggggctatggtttttcagagatcaaagtttgttcccaaacttggttgtcctgcctttagatgcctttgagattttccttttgggttgaaatcttttgaaagattccagggtttcccgagctcctttaggaagtgctagcgtgtggagtgacgtagcgtgtggagtgacgtagcgtgtggagtgacgtagcgtgtggagtgacgtagcgtgtggagtgacttagcatgtggagtgacgtagcatgtggagtgacttagcatgtggagtgacgtagcgtgtggagtgacatagctgcgattcagacatgcaggacttcgtgtaaatattctcattttatttactacctggaaaaaatttaccttttcttttttctttctgagttggggagtaaaataaataggcacaaggcaaatgcaagtgtgaaagaacttttggagaataaaggttttgggagttaatagtggccagagaaggctccgaggacataatcctggtggtagattacgaaggcaagggtttaattaattaattaaataatttattaattttattatatgtaagtacactgtagctgtattcagacactccagaagagggcgtcaagatttcgttacggatggttgtgagccaccatgtggttgctgggatttgaactcaggacctttggaagagcagtcagagctcttaaccgctgagtcatctcaccagcccttaatttaattttttaaagaaaggtataagatataaggaggagtgaaggaggtctagcctttgaatgcatgaatattggaatgaaagaaaaaatgaagttgagggaattagccacaattccataaagtgtcctagagttaaggaaattggcagaagccagtgggtgcctccatgccttaaaatagatttccattggacactgtggtgacatttctgagcctccaaaggccagaatgtcaggtggcatctgagccttcgagagtggaggctggcaggccatggagggaggcccttacttttaaggataggtgtttttctaattgaagattaaaactttttttacattacattttttatgtgtttgagtatgcatgtgtgtgagtgcgtgcatgctcgattgcctgtgtgcctgctgcagtgtgtggaggtctctccttccaccagtggctccctggcatgggattctgtagcctttagacttggtggtagttgcttttattttgcaagccaccaacttatgatatctttatccacctaagggattaggttaaaatatgtgagcacattgaaaacaaggcctggcacattctgcactcagtccttctctagggagctaccagggagtgtgctgcatcagcaacagggagaagctaaaagacagttaggaaaagctccagtgttgcctggagtagacaaaatggtccaagtggccactgccaccagtgaaatttaacactatttgcatacttaatttattcttttattttgtatgttatgttatatatgtgttgaggacataggttaacactaaatttcttcctctattgctcgaaaccttattattattatttttttttgagacaccagctctctgaacagagatgggggaggggggatacttccttattggctagaccgcatgcggtaagctcttgcctgccctgagcccctcacaaggctggggttacagatgcttctgctctgtcttttgtaaagcctgtgtgttgggcatccagactcaggtgctgtttgcaggcaccgtgcaggtggaggctcctgcctccctagccgctccattctttgttttattgtggagaggagctgtaactagtctttggttggcttctttatgctcttcagagtgagcccaggcaatgggtgatccacgttttatttttcttacggaatttaaatgtctcaacgaacacatcagtgtacactgcaattctttttcaagccagagatggcatttgcaatgtgaatagtcttcagcaaaaaaatttacctacttgataataagcctaaaaacattaccctatccattatagagccattttttctgctctcaaagaattgttacagcaccggaaaatgctctctctataatgttagatgaaaattgggttagattctgattttattttttatgaacttacaaaaataacgcaccaagaaaccattttgagaaggtagagacacacgcaagtgattttccctaggtgtcagggttaaaaatgatttttgtttactgattcattttattttcccggatttctgtcaagattgcactcacactttatgtaggaaagaaagtacaaacattgttgaaacctgagaacaaacgaacagggcacactatttgccaaggaagtgttctgtggccatgcacaaggctacaaagaaaggttgcagggcccgtggtgggcgtttgctgactggggaaggggctttctgggcaaacatgagagcctgaggtattcctgtctcgggggaggtggagacaggcagaaccatgactcttacgagctgactctatggacatccctgacacttggcttctaaatttggcttccacacacagatgcatacacggacattcacttccacatacttgtacacacacacacacacacacacacacacacacacacacacacacacactacagaaaggaaaagtcttggggtgttgtgaggcttaattcttccgctcagcttggggactttatctttgttgcctatgttggtccctctgagttctatttaaaatgatccattgggtacatttacgtcaatgtctgacttacagactccccacccatccatgatgtcttgtgatatagacatgaatacagggctgaaccactgcggtgtcacaaagacttcatcaacaagccccatttgataagtgctgcaggaacccactgatgcccgagttataaatgggtatattcatggactttcctctgctttccagagaagctttgtatccgacaacatttttcaggtggaatgcctctttttgaatttacaataaatgagaaaagtaagtagttatagtgtgaatacaaataggttagtttctaagattgtttctccgttgacattgtctgctgtcaaagccaccacgctcagtaactggctggtctggtactagagaaagccatgcgctgctagtagagggaaacaggatcatttgtagtttcttaggctttgaaatccctatgttctattttaacattattatattaaatgaatagtttgagagagccaagaattggtggtggcttaggatgtgttccaaaggctctgacatgaggtttctcagtgctggttgtctagcgcacaactgttggacccatggacgtttaagttgtgtgtgtgcgtgcgtgtacctgggtggatgcacccgtccatccgtcagcctgcctgtttgtctctctgtcttgttggttcttttgtttgtttatttagttgggagcattttttatttcacaacttgggatgggcagttgaactgaaggttttccctgccttggagttggactttgcctctccacactcaaggctgctcagtatctgtgctctctctgtgtgtgttcttctcggatctttgtctggcagttctttcgctggattctttgcatccaaaagtcaccacaataaaacctcctactccaacaccacgaaatggttaccaggaaatgtccgagtctgctcacagcagatcctaatgagccacacgacatcaaatctcccagggagtattctcaacttgttcctaggagtttaaagggcttcttcttagctcctggggagagtccagtctgagttcagtctatactgtatctccccacctgagctcactgagtggggtcgcctggctggcctgtgagcccaaggggtctgattgtcacaggctctgcactgctgggattgtgtaagtgacccgtgcctgacttttcatttaaacactgtctggttattgcttagaagcaaatacttgcttgtaaggcaaggacctgattaaactatctccccaactccagatatttaaatatcaatttgctgtaggtaatcccgtggaacatgcccatgatcgatctgagtacttgggctcagagagaggagattcaggaattcagtgtcattcttggctgcatagaaggtctgagactaacctgagctatcggagactctgtctcaaatcttcctttcctccaatctccaaaaaatgctgaaattaaaatccaaattttacttagttacactggctatattttgtgtgctcagtagccaagtggaacttatgggtaccacgtcaccagacatgtatggaaagttcctttgggtggtgatgacatccagaattgataattctgcccttctgagtttaggtaggttttgtaatcacatccaatgagtgtccttcccaactcattttctccctgacaaagctttgcttaactcatgctagagttagttctattctgtgagtacaccccaactagatagaagaggcagagggagactaagagggggatagagtttatcgtattaagtgtgatttagataaaatgatagtctgatggagaaaatgcccaattaatactaaagagacgtcatagattctcagccttttggagttgaaaaggctctttgattgcatgtaatcaaacctcttatttaactgatgagaaatgtgtggcacagaaaggttaatttatgtcccacagcttgataatggcttagttactccatattcaagttaatggttcctttcattgcgccaaggcgacttttgcagtaagttcccataccccagttctgtggttcctctgcctctgaagcctcagagccaatcctgctgccatagcttagagtaataaaaggaagttcccttttagacatgcggttcgctgaactttctttatctatctttggaagaagaattctgccacattttaatagacatctttaactttggttttgaaattatagagtttatttaaaaataggagccaaaaagggatgggagcatagcttcatggaggatttacagatgaggacatacacacacacacacacacacacacacacacacacacagccacacacaccccgaaaaggaaatatgcttccttctaaaaatagctcattttgcgggttggaggtgagagcattgttgttaataaaaggatttgcttttcgaaatatcctgttattagccaggcatggccaatatgcctgtctgtaatcctagtgtttgtatatggtgaccagaggatcaggagttcaaaactagccttagctacatagagttcgaggctcatctgggctgtgtgagagcctgtgtaaaaagtaacaacacacaaaaacttaagcaaagtagttgtgtgtgccttttctttttgtttttgtggagagggagagtggtgctcacagctccccccatgctagggaggacttaagcagtaagctaatcttcagctcgaaatattccatctttattttgttaagcttaatggatcaatcagctgtcaccagtgagacttgacctcccatcgcatttaaagtaaaatagactttaaaagaggacagtaaatgtaaatgtatgagagtagggcaccgttcttatgttaatagactttccccagcactgtctatctccataggctacattagtggctgagagctggctgcggagcgatttaggtttattgtagcatcaatggctgcatgctgggaaaagctggggttttgttaggattatttttaccgagttctgtctgattatgcttttcaaatatgtcctaagcttgttttctttacttctctgtttcggctttaccatctactccttgcctgcactttcttgttttgagtctgcgcctctgtcagcttttcatcgctacaacacagtccttgcggaaaacacacaacaaataaacaaacaaaataaggcgaagggaactgtctttgttagggctttactgctgtgaacagacaccatgaccaaggcaaatcttagtaggacaacagttaattgaggctgacttacaggttcagaggttcagtccgttatcatcaaggtgggagcatggcagtatccaggcaggcatggtgcaggaggagctgagagttcgacatcttcctgtgaaggctgctaggagaatactgacttccaggcagttaggctgagagtcttaagcccacacccacagtgacacacctactgcaataaggccacaactcctagtggtgccactccctgggctgagcatatataaaccatcacaggaagggagtttcattctggctcatagtttcatggcgtgtggtaagaaggtgagggctcaagcttgtccatgtgcacactcagtcattctccaccttattcagcgagtcaggatctcacaggcaaacggggaactttccaacatggtgtcttcccgcttgatctaactttcctttctccaccttacaaggctacagttctgagcattgccatcccacccagtgcttgtgctgactctgggtatgtgaacgccatcctcatgactacctggcaagtgctttagcaactgagccatcttcacagcctttgattgattgattgattgatggatggattgatcgatttgtcatctgtctctctgtctatcgtctctgtgtgtgtctgtctgtcgtatcaccactgatgtttgcttcataaaacataagcctctgtgctcagagaatattgaatggaaaagagataaaccagttgtttggaggcgccttgagtttctgattgttgttctgtttgcttttattagtgagcaagatgcctagattattgcttaatgaaccacgtcaggtggttttatactttctactctaaagcgggccttttcttcctctgtattttgattgagaaatagtctgggctccccctaacagtgtgttttgatgcaacaggtagataaataaatgtccagggattaaatctcagtgctggatgcttggctttttttttgcagcctctttctggcgattggagctgttttcatactgtgggtttgctctctctctctctctctctgtgtaatgtatacatatgtgtttgtatctatgtctgtgctatatgtgaatctgtgctgtgtgtgtgacatgtatgtgcatatgtgtgtgatatgtatgtgcttgtgtgtgtgatgtgtgtgtctgtgctgtgtatgatatgtaagtgcttgtgtgtctgtatgtgctatgcgtgtctgtgctgtatgtgactccctgcttctctctctctttctctcttcctctgtgtgtgtgtatgtatgtgcgagcgtgtgcacacatgtgtgttgaggaggtgatattcttggacactcaccaatatgtgagccacacactatcccactgctagacatatacataccatattaattctttttcttgtctagctttgctgttttgctgacttttgttttttatctacatgtgaaataaagaacacattgaattatatatgtgcatagaaataaaaattctgtgtatcttaacaatttatatgtgatacaatgtgtaattacgtatagattaaaaagtttttttagagaggacacatgtgccccaggctgatggactaccattgcggactctatttgttggtgaaaatacgtgttcatgttagtgctagtaattacctctagaaaataatgagctttgctgtgctgtgacctttgttgttgatgctgtatagagatgtgatgtgcctttctttctgattcttggtatttttagttggcaactgcattcccccgcttgtgaagtgttatgagttggtgcgagggttctgtaaccttaggagagctacaagaattgacacgatgagtctgattagagggctctaatcatctgtttttgcttgtccttatacagctccctagaggatgaattaagggactaggaggcctactcatcagcatggagagatatttgccagtttcgaagaagcgcaactcatcctcctctttggaaaagataaccggctcagcaaatgggaatgggactctttactcaggtaggattctgtgggttggggttctttggaactttgcttactggccagtatttttcttgagatgctcaggaaacactggggacatgtttctaggtctcatggcatttggtgtcccacccaagccccacgacacagcacaaatacagcagctttcaagttacaaaggatttggtcagtactcatcttgatcatacaagacagagtggcccaggttgcagtgggtgacccagcacgtctgaatctcggtgccttctgctggtaactgtctgtagctatctgtgctgtcactacagacgtcagggggctctcgtgcttagtgaccataccattccttagagctacccatcagcgctgtcccaccattccacagagctacccatcagcgctgtcccaggttagttccaatgagaaatgaagaactgtgagagaagatgttactggcagactctccaaaacagtgagcatgcctttggaaagtgtgtagtgtgaaagaaatttaggtcgtgtgactttgtgtgatataattggataaaacaaagcaaaaaaaaaaaaaaaacaaaaaacaaaaaaaacaaaaaaacaaaaacaaaaaaccccagattgtttttaattggattttaatatttaatgaatttataaatgcatctctaaaaatatttatgcactggtttattttaaaaggatacttttttcccctgaaaatagaattgcatgatttatatatcagcaaattaaataagggcaagagagccctatgaatcattaatatttgctgcagtgaattcatacaaaatgttgcccattaatttagggggagagttgaccattgtctaatgaaattatcaagtttgtcttcactttgaagtaatgaagtgtgtgtgtgtgtgtgtgttcacttatatgcggtaggccgtggttgtacgtggaggtgagagtcacagaacacgttggaggagagttgaactctgtcttcagacttgggagtggacacctttacctgctgagccatcttgctggtcccatctttgtgttttgaacaaactagtcaatgatggagttaaaaacttctcgataccatcgaccttactagattagatctctcagttctgtaaaggtctgtaaacgtgactatcttagtgggataaaggctcatagtatctgctgcagagtcaggccattcatcctggattttctacacacaaaggatgagcgagggttctctctaagtacagctggcacctgggtcctcttcagagaaatagaaatacttttctgagagatccttataccccctccccgccccctgcaggctgaaggctcagactaattgttcttttgttgatttgcctcccctctctccgtgtgtgtgtgtgtgtgtgtgtgtgtgtgtgtgtgtgtgtgtgtgtgtgtgtgtgtgtgtaaaactcgcacttgcactccagtgtaagcatgcatatgctgttcacctcgagtatccttttcagttgttcattatttatttttattgatcattagtaacagttgaggcagaaatttgtgggtcacatgtggggtgtgtgtcagaggacaactttcgtcctcttaggtcatcaggccccctgacctcttctaccagcctttcacccatgctctgaggcaagcccttgctgacccagggcatctgctggttttgctgggttggttaacctgtaagtgtcaaggattccagccatgcatgcaccgctttgcttggctctcgtgtggatgccggggatccaaacccaggtcctcacggttgtatagcaaagcacttcactgacccgtggccttgagtactgctagacaggctctgctctagtcttccccacccgccatctttttctccgttggcagaatgaagtaatcttacagtctcacactttggaagttcctgggcattgcctggatttttatagcgcatcctctgcacacagcgctgttctgggggcggtgtcattttttagtgatgagttttccttttcacacagctgccatgtttctccctagcgtgagtagatgctgaagctcattacggataatctactgtcaggaaattattcttcctgacaagttcttcaggatgatatcagagtctgggggattcctggctgagagctcattcatgatttgtactgtactctcgagtagtggatgatttaaatcatgcgtgatgctctgatctttaacacgaagatttctaaataattctaagttatgtttggattttgcagcttctgacccagtctttctcactgtgctatgggtttacgtgtccctgtttttttttagtacttcattatgtcctttagacaaggagactttgatagtgctaccatttctatagattgaattaaaatttttgtgtgtgaatttcaaacatgagtacaatgtattttcattatacctccatttccagttcattctatgttcccccattgtccctctcaaatttatgtcttcttcctccacaattattgttgacgtacctatatactctattgaggccaattagtgttgcttatatatacttgagtgtagacctgaccacttgggcgtgggaaagccatcagaggtcttgtcctggaaacaaacaaacaaaatagccatccactgtctgtagctcttcagctaggggtggggtcgcacccttcctcccccagtgtggaatgttgatggtgtggtcttgtgtgggtgagcagattatcaggagttcatgtatgcaatatagtgtcacaggttttaaaagtgagtctaaaactttgtaaactaaaatgaacaatttattctccaaatcacatctagatttgaacattacaacagataacatatcttgaagatgaggacagtggatgccaaggtcaattgacttgggtgtggtgtgttgggaacacccatactgaggttgggacactgatgccattaatcccgaccccaccgccctacaactcagattcccttttcttctttctcctgtcccttttccctctgttatgtgacagacgcatgatggcatctccttagccataatgttaactgcttaaggggtcgagacaaggagattgtgagcttgaagccagcctgggacaagattatgctgagagtgtgccagctgagactttgtctccaaagatatataaacagggctggaatatatagctcactggtagagcagttgtttagcttgtgtgagatatgtgaggccccaggttcagagggagagagggctgtggaggcggagagggagagaggagagaacacaagtgagtctatgcagcagagaagacgattttacctgatgatcaagagacagaaaactagtcttgtggcttcagtgtgttcccctttgcttcttttttctgcccactcggcctgtggctgatttagtgccttgcaaggatgattctctcatgggctgtatcccggctgagactaaactgagtctcactggtagttttttcttttcctctttccttcttttggcttttcctcaggagagctcagatcttagctgggattggcaactcaaatgtgagtcctgttcctgaaatcagactaaaaggttacttcctccctagaaacaaagagagtgtgcacctgaattaagtacagctaaacaaagaggtcccccagtgggcagagtaccccgctgtaccccaaggcatgcaggaatgaagcccactgaaattggatggctgggcttctgggtcttgcatcagagtgaaaggtggtagagtgtggggttaccataatacaatggcttctgagacagggtctgtgcaggcctgagcaacgtcatttcccactggagcctgtggtcctgtatgttcagccaaggccagcctctgaggacaacgaagaaagctgaacatgtaaacgtaagccttacaaatgatgatgatgataatgataatgataataataataataaatggagctagagaggtagctcagtcaataaagccctcgagtttaatgcgtgaggacctaagtttgatccctaggacccttgtgagaaaagtacacttactgccccagtgctagggaggcagagatgcggagatgctcaggcttgctgaccggccagactgtcctcattggtgagccagtgagagatcttgtcttaaaaacaaggtggacggctcctgatgagtgaccattggcaccgacctgcatgcacacagtcacagacatactcacacacatgaacacgctcatacatgtgcacacacaaagaatgcttgtgtgtattaaacatgtttctctttgtatatattgtggatctgtctgtcagtgcgttaagagacaggttctttatgtgattatggcttgcccaggctagacttgaatgtactaattttcctgtcgtagtgaccctagtgctgtgcctggcactccccgagactatatcattcagacaaccaagccgcttttatttgtgagaacatgggtcaacatgcttagaaaagttcagggcttactcctcattgtgagaactagttcttgtgggtcaatatttacacacccacatacacaccctcaccccctatctgcgctttgaacttcaggctgcagtcgtggcctcagatccagggtagacaggcagctgtcgttccttttctgggttatttagagagcggctcacaactgccccgtttccctctcctggtgatgggaggagctgctggtatctaaagatgatgtaaagccttcttcctatctcttttcacgtttaagaaattacatagcatgtgagagattgtcttctgcaagattttcttcatggggaatctgccagtttccagagccctgcatggtaacagttacaggcgggctttaatatccatccgtgcaaagccaggctcccttcagattgtaaagcgagctgacctcagcttttattaagaaaaaagatgtatgggacacttgtttattatttttatttgaagtcacttgtgctccggcttttcataagacattctatttatgtttattctggaatattctggtcccacagatagctttctgttaaaaccaaaccaaattgaaccgctgttttaatgaacacgcctgctttctttgtaaggtgtgaagtgttcatagtagcttttcatagtgggttttcatgacatcatgggaaatgcttcccacttgaccatttatgatgcgggagttgtcagagtttccttgataaaatgtttgtgggtttaagaggtttatggatcagctgtaaatattttctctggctttatgagatctctcctcataaacattgcgtgtgtttaccgattgctcattgaacgtgcctttagagaatcaactgtttgggcacacaggcccaaggaggggctatatgcggcagattttaacagactttgttatgagtaagcctaagttttgtatacagttttatttttctaacagcatggctagagttaccagtgttggacatacaatttttgtgttatttaatctcattctgggtctggcatgtggcttatttttatgaagtgtttctgtagtaggccagaatgacttgtttgtttcggtgtcttagatgctccaagtcttgtatcttcctagccgggcttggagctcaggacctagacactcttttgcaagcatggctgtgtcctcttgggtttttgcttttaagcatctttattggcgcacactcaagaagcagctgtagcaaatctccgtgtaaaggcaacttttaagtcctcaccttccacgagcttcttttagctgggcctagtggtacaacaatatgccaccacaactccttgggatgctgaggcaggaggatcacacatttgaggcctgtttgggctaaatgtccagttattgagaacttgtcttaaaaggtaatattagcattttctgattataaaataaaatgctattttctattcatctcttagactgtgtagaagaaaacaagacagttacttatctttcccttagttgaaaaatcaccaggagaagaaagggtagcctttcactctggaagccccccccccccccgttcttaatccctctggcccacctgagagcatatagcaggccatgccccgagatggaatctcctcttggccagtggagtcagcgcttgcttgtgaaagatgcatgagttgaaaattgacatcatttgaacatttttgtaagacaagtgaaatatcgaggcattccttttaatcgtgtgtgcagtgctttctgctgtgtcttcttgctagccctgcggatggcttaaaatcacatgcacaaacacacatttgctgctagacagagatggcgtaagggagggaatgtttacttctggttcacagtctgactgtctgatcagtcatggtgacttgcgtctgaggtgtctggtcatgttgtaccctcagtcaggacgcagggggacggggatgctggtcctccatgtccctttctcctttttacttaggctgagaccccagttcatgaatggtgccatccgcatttagaatgaggtgtccctcttaagtaaagccaatctagaacgtctttcacagccccccaggcgtttgcctcctgagtgatgacagccacagcaaaagtcaacactaatagtaactgtcacaggctgcttagctttaatcattgaagttacaacaccaagtctatgtggtctttatcttaaagtgcactctttgatgcttctcattatataatgttttggcaattgcctttcaaatcccaggtctgcctttcttccttcctttctttctttcttccttccttccttccttccttccttccttccttcctttttctttctttctttctttcttttccctctttttctctttctttctttctttctctctctgtctttctttctctccctctttgtttctctctctccctgtttttctttctttctttctccctctttttctctttcgttctttcttttttctctccctctttttctctttctttctttctttctttctttctctctctctttcttctttctctctctctccctttctttctttctttctctctttctttctttctttttctttctttctctctctctttctctctccctctctttctttctttctttctttctttctttctttctttctttctctctctctctttctttctttctttctctctccccctctctttctttctctctctctctctttctctctctctctccctttctttctttctttctttctttctttctttctttctttctttctttctttctctctctctctctctcttgaatgtactttaagacgtcagaaaacagcttgcgggattctgttctttcatcttgggattccagggattgaactttggcctccatctttggcagcaagcctctttgaatgctaagccgtcttgtctgcctcaaagaagagttaactatcttgagggactttatatacatttggttgtttgtgtcctttcccttgagatttgagaagcacataatctgccagcttctgttggtgtgagaggctctgagaactcttttatggtaggagacagggctctgcatggggcagacatgcctccagggatcacattaggggtgtcaggcagctgctatgtctgtcagtaacttgcagggagacctcagtttattaaattctccttacactgtgtgtgtatgcatgtttgtgtgtgtgtgtgtgtgtgactatatatgtgtgcatgtatctgcctgttattgtgtgcatgagtgtgcagccagaagagggtggtggatcccttggacctggaattacaaatggttgctgggaagtgaacttcatgtctgcgagagcagcaaactatcttaactactgagccctctttccaacccaatgtatttttcttaaaatgttactgaagtcactgttttataaaagtctgttagtttccagtctccagcctcagtgcatagggattttggtgcctgtatatatcttggcccacactttaggctggaaatgtctctttgcatttcttccagtcttcccacactgtgatgtttaccatggctaatgttaggctaatccatgaatatcagatagttagccttaagacagctcttactcatttgattcaaagcacaaatgctccttttaattttgacaaggcatcaaggcattgtttcttcttgtctctgtttcttttcttttttctatgtctctctctttctgtacacctgatatcaatggtaaccaatctgtctcccccccccttttttgcagactttctcattgaattcttatgcaagagtacatgcacacacatgtacacacacatagacacagacacacacacacacactacccatcaagactttgtacgtgctttctggatctctgaactcagatcctggtccttgaacagcaagcagtttaccaaaggagccatctctccagctcccttccctttttaaaaactcaatgtttcttccacagcgagcttaagttcttgcgagagttcatccatagcctctgaagccccggagttggcttgggtctcctgtgggctcctagttttgatcttcttgctttgttttgcttccacagaggaagataccaacctggaggaaaatgacttcagctggggagactatttggaagagacaggtaccagagcggtgccacacgtgtccttcagacatgtaggtcgatcactttatcccttcttctttgtgggagggagggagggaaagggacctgctgggggaaactccagaaccagtcagaagagaagactgaaggagaactggaaactcagctaagattttgtaggaagaaagctagatgaggcggggtggggggaagatagctgctcctgaaacaggacacagtttgattctaataaaaagccagtgagttaggcaagatgttacattaattcttagcaggtgtaatgacaatatatatatatatatatatatatatatatatatatatacatatatatatatatatatatatatatatatatatatagagagagagagagagagagaggtgatttggggctggggactctgctcagttgatagaatgctttcctagtatgcatgaagccccgggtttgatctgcggcattggcaaaaattgggtgctgtggtgcatctgtataattccagcacggggaaggtagaggctgggggatcagcagtttaatctcacgctttgtagagatcttaagactagcctgagttacaggaggttttgtcaaaaaaaaaagttactgtaactttgaagagccacaatagagttttgtaggttttagggtagaaccaaattagaggaatcacgatagagagcctggaaatgcaggtctcacagaattcattctccttcataatatttgcttgtattattcagctagcatgtgtggctgggggtaaatcttaggagaagggaacacaggcgtttcttagtcatgagctcttggttgggaaagatggtgttccccaaacccaagctcatatgcgtgactattgttttagtaaataaaaatttatttctgggagatctgtttttccactgggctgtcccagcagcaactcagcctccttaaggttagctttcattcttcagctgaaataagacagtcagtcacattagtttctacttggaagtgacatgtcttctcaaagggcatttaagaccttgggtttgtaaggatgccctcctcttccttctctgtacctctcaggctgaactttattctgaacatgtttgtgccacgtagtgaaaccagagtttacgttttaaagcacaacacaggtgacacgtctctggcttatatagcgaggaccacggtcctgcagaagccatggtgacaagatgctaggatgacctgtgatttccttagggtagtctgggaaggaaagaccggtggacagcttccccttctcttctgtatagtaaggtcatgtctttggtaaggggtcacctccagaattgtctgggtggtcacttctcacacctccttttcagctgaagtagatgtcaccaaatggtgaacaggtgattgtctttcagggcctctgtattcctgaaggaggatgcaggcatctagctttccagatgtagactgcccctggcctgtgtaaaggatttccagaaaaagtagccatttcacagatggctacagattcacagattccccatccccttgctttcttcaagggtctccttatggtagaccctcccatccgttggggatgctgcttctgttatttctaacttgtgtcttggcagtagctgctggcacactgaacagttgagctgtatacagggaagagtatgtagctctaattgagaaatgctcttcattaagctcaagatcttgggagtccttgttccaaaatactagcttttactacatcatcaccaccaccgccatcatttacatacagggtttaatgtagcctaggctagtctcaaactggatagccaaggaggagcttgacttgattcttctgtctctacccgcctctttaaatttatttatattaatttatttaatgattcagtgctgagggtgaagccctcgtgttttagcatcataggactccctgcatgttcggcaagcaccctgccaactgagtgacattttcagcctttattgacttttttgctgttttaagacaagatctagttgtgtctcccaggttgatgtaaatctgtaggatttctgtgttggcctctgggtgctggggttacaggtgtgcaacaccattcctgcttactcatatttttatattattagtttcaagctattgaatttaatgggtgaaataaaacttgttatcagattcattttatcttttgagtgtggcttcctgagtatttagcttctccttagaggctcatggtggatttgtcttaaatatacacctcaaggcagcagcgattatgtttgcaagttcttgtggttaaatagttcttaaaaatctttcgaggctcgtgactagtctgatcagggttttcctgtgtgtgtttctgtgtctcaaggtggagatcagcattcggagtaacttccagccaggaatgaagttggaggtggccaacaagaacaatccagacacttactgggtggccacaatcatcaccacctgtggacagctgctgctcctgcgttactgtggttacggggaagaccgaagggctgacttctggtgtgacgtgatcatagcggatctgcaccctgtggggtggtgcacgcagaacaacaaggtgttgaggcctccggatggtgagctcgcatgtcaaagggtttgatactcaagaggttgttcttcatgatgcctgatctttgctgcaggggcagaaggacccttctataaaacccccgagtgggtttagtgcaaaggtttcttcgctctttaaaatgccgggggggcttaattatttagaggatgctgtggggtgggtggtgggtggtgggtggagtttttgtttatcaagcatgctattgatcttcaggaagtttggtcaaacaggaggaaaaagtgttcaaagccaatttgaaggttgtctttggatggtaggggaggagtgtaagctgaatggtaaggagagagagactggggagaggagagaggagagtttcctcttttgggattacatgagttgcttttacctttctgtcattgtaagtagacttctttctttaaaggttaacttgtttttaattacgtttatgtgtgtgctgctgtgtatagctgagcgcttgtgagcccaggagcccagatgaggtcactggatctggagttacaggtgcttgggttctgagccacctggcatgggtgctgggaactgaacttaggtcctttactatagcagtcctcgcccctaaccgcagagcctcttctctagcccgccgacacaggtttcttttctaagtttgcttgtttgctttcttttctcttcctctcccttgtgtagagcagactgaagtctttgaagttctcatcctcctgcctctactttctcggtgctgggattccagacatttgccaccacagcccatatgcacaggctcttggcatccccagtgagcactctaccagctgagccacatccctaaccctgcacttagtttttgctctctcttgttgtgggcatactggggtatgaaacaaggagaaagccaaaccaatgagaactgacatcacttacaatagtggtccaaactcatatagacatgagatcagtttagttgccgcaaaacaatggttccttattgggggtggtctcccctctagacatgtgtcaatgtctgagagtacttttgtgcttgatgggggagagaggctatcagcacttagaaagaccaaacctgaggcacaggtttgaaacttcttctaaggcacagggcatcatcacaattaagtattatcaggtttagccttcctgaagtgctgtcacagaggactcctgctggggaagctcctagggactgttagaactgagctcaactaagtatctgactctgatcatactgtgtggttacagcatccatggtacctttcagctttgctacagtctcccaagggtattccatggtctccatgcccagctgtctgctcttcctttggaataatctatttccttctccctcttaccaccctcccccactttctcttttctcactcttcccttttccttctccctgtccttcccctctctcttcccctctttcttctcccctcttctctttcttttgctcctcccacatgcctctggtagaatatttctggttgtggagaagggtctgtggcttttatttcctctctttgttatgcataattgatgacttgctaaaaaggggtcataaaattggcctaagctcaggagttgcctttgtgtgacatttgtcagggttgaacccattgccttggccttagctgacatcatgacccctcattgtctcagaagaaagaaagtgagggcatccttttagatctttgtgtctcttctgtcctgcctggatcaacttgcctccttcatcctcctcctcttctctcactggtctctgaggtcagaactgatctgtgctcacaaacaaggccattgggacctaagtggggctcacatcgatagtgtcagtgtgtttaacgtaatataatttattaatgaattaatgttgcagggaccttgagaatactaagcaaacgctgtactattgagctctgcctggagccctgtataattttaaacttaattcatgtattataaaagtcatctctgtaagttggatgactttaatctcattcacaaggttgtgcaaacaatgtcactatcaaggtctaggtagttttgttttttttttaatttaattttattattattttttaatcatccctaaattgttccccattatttttaccttctataactctcaatctacttttaaaaattcacatttaaaattttatttgtgtgtatttatgtgagtgtgagcgtgagtgtgagtgtgtgcaagtgcacacatgcatgtgtgtgtataggtcagaggacagtatacatcagttctcccctaggaatgttccagttttggcagcaggcatctttacccaccggggcattttgcccaactccccagcctgctggttgccctttaaaacagctgctatgtgcctctttgcacagagttctgatggtgttagtgctctgagcgctcctaggtgcacttgggatggttccagctgtccctggagagacaaggcacaggccggtcattagctcctccccgcatttggaagaaaaatatggcagttgtcaaagtctcagaaacaccatcaaatttgtatcctgacgcctctgtgctattaagcaagacaaagacacccttaaaatgacaagatgaaaatgaaaaatgagaaaaccctagaaaaaggatgaccattaatgtgacggaaagatgagacgtcttttcaaacaacaacggtgatgttagcttgaggatttcttcagtgctgtcttgtaaagaacttaaaaaaatttactatgtaatcaatatgacttgggaatctttagttcagagaacaaagtcgggaaatagcaggttcctggggcaagagcttttattgatttctgtgaggagggataagtcttgcttcataaccagaggcaatggttattctacagggactaggggtatctgggttttgaatggggatttttgttgtatggttttcttggtgagttaatggtataaatactgcaactgggcccggatgatctttatctttgttgtggttgaatttaaaaggcattgaaaaatatgaaatagcaacctgtgaccctaatgtttctgcctgagaggctccgtggtgatcagaggcgtgcgcgcgtgcgtgtgtgtgtgtgtgtgtgtgtgtgtgtgtgtgtgtgtgcgcgcaagtttgtctgttttcttaggtctatccattttgttgttgttgtttttaatcagacagggtctctaattggcctttagctctcctattaggctagaatggctggccgggagccccgagggtctgtctttctctgccttacctgtactgggatggctgggattacaaactcactctgtgagcctggcttctggagatctgctttatgttgttgagcttacaaagcaaggactttactgaccaagctctcactccagcccgactgaggcttcttataaatcccaggaatcaaagtaaagtgaggggcacggccatcagaatagagatccgagttcttgtgagcacctgccattaacttggttctgtaggtcagtaccctcagcccttccccagcagttccatcattgagatgatggcttctatgatgtactctcagggagttaagtgccccaaccttccggtgtctgtgattccaattaaaggagaacagtaggaatacgtgactgcttgtctctctattttatgaagtttattttaggattagggtccatgcatgtcagcctaggaatctatgacaaacacaggaacaaagtgcttgtgtccctccctattggacagtggcctgtactctagttctatttctgttgctgtgacgatgaaataccctaacaagagcaacttagagaagagtgggtttatttggcccacaatgcccagttatagtcccttataattgggaacttgaaacatcacatctgcagtcaagggcagcgagagaagtaatgcatctttgcctgcttccgattctccaacacaatccagggtccatcgcagtcaagggcgcgagagttagtgcatccttgcttgctttccatgctcccagccagtccagggttcttcaagtgaaatggtgcctcctgcattcgtggttgggtcttcctacctcaattaacatcaaggtagtttaccaaagacatgtttgcagaccaacccgatctagacagtttcttactggagactctctcaggttgtggcaagctaacagttagaaactaactgtttctatatataatttaggatggaacatgattgtaattgcttgggtagaatgtcctttaatcaacaattagaggctagttcccttttcacccttttcaatctagatagtcaaggcgttccagcttcccactgagtggtcacggaacaaatgtacattgacagcttagagtatgtgggcttttacccacattatgtgagggtacaaaaacagggcctcccctcaggctgaagtgtctgagttcaagatccttggattagctgaagcctgcctttgcagccacgtcatagaaaaaggagccatttgattggttggttgcttgatacatggtttttacggggtgctagtgactgaaaccagggcgttgtgcattctaatcaacctctgtaccaactgagttctatccccaaacccacattttgtaattttagatgccagtttggtggggcacagagatctagttgtggtattacattttcctgcctctctgttttaactctatctttgaattaatgtacgtcttcataaatatgttaaatgtcggggggcggggagggggagaaacctgcacacccgtgttcccagttcatgtcagtaaggtgtgattgccatcagtagtcagagaatgccattaacaaggacacgctcagagacaactgagtttagcagccaattggccattgagagggcagcattcctgctccggggctaaccagcgctaatctttcatattaaaagtattacgcgacgcactacattaaagcctcaataagtgcagccagggattagagctcctattagcagggcaaaacggaaagcgttctggcttagtaaatcaataaggcttgatttattcataagtgtgcaccacactcgcaaagggcagctgccaaataattattgtttatggtgataatgcacggaaatcatttaatgcaatggctgttttcattgctatgtattcagaagtagcaacattacctcgtaatgtcgggggcctgggaggtttggtgctctgaccctctgaatgatgcctattgagtcctttgagggatgctcctgtgtgagattgcaggtgaacatttgtgaagatgcaggacaataaaagccctcgacttctaaatgggcaagtatttatgtgcgcttttggctgctgcaataagagtgttggaattacagtgccttaggatcctgccactaatttttatttttgccattattaaaatttccgcaatttgaattgcaaacgcccgaaggctcgccagaatgactgtatttaccatttccaagtggaatcaccattgccggagttagttaatatatataacttatttgaatgaaggaatgtttattcatgaagtgtgaggagaaagtgtgaagactgccttatgttaagtgggtagatttgccaagttctccagtgcctgaggactctagtggattgtaacagaggaggagctgctgcctggtgggacataaggactcacctgtccacagccattgtgtaaccatgactgtgcaaaagagcatttggtgttttatgagactgttcatttttagtttagttttttttttcttatttgtgtgtctgcgtgtgcacgtatgtatagtgtttgttgtgtatatgtgtgggcacacatgtatatgtgcatatttgtgcctgtgtaggtggatgcctgaagatgatattgggaatcaccctccaccacacttctaccttactcaatgagactgactccctcactcaaacccagagctctctaatatggctcctgcctgggaattccctgtctctgtgctctgcggccagagtgaacaggccaggctgctgtgaacacatgatatttacttaggttctggagatctcaactctaggaagcatttaaccactaagctaccatttccctagtcagagagtattcactttgagaacttcaattttcaaaatgaaatttcagtaatattagtgggacttagccacttttttctttggagatcttgtttattaacaaaacttagtggtaaattgtggtctcaaacccagaatccgcttccgtcagcctcctgagtgctagaattacagttttttcctatcatgcctggctaggtcagtctttcttctaactgaacattggaattgagagaatcagaggagaactcagtattagagaatttgatgtaaaagaggataaagcattatcggtatgggagaagacagtgccccagagaagataaatatgagagtaaaatgagttaactagagttgtattttaaaaaaagaaatcctttggtcaaaagtcagttttcctagtttttcaatgtttaggcttacactctagcctagacttgcctggacctcactctggggattgcgttggctttgaactcatggctgtcttcctgcctcaacctcctctaggtcttgggattacaggtatgcgccaacatgcctggctccaaagctagcttttcaggatggtgtgcgaaagaagaaaagtgcgcagtccttctgcgtgggctctaagtcggctcttgaggtggtttggaagccctttgagcaggcgcagagcctgtgtatagacatgcgccattgcagtgtacaccaggcatgcgaacagtcctgagtgtatatgtttgtgacacacaaactctctctgtctctttcccattctctctgtttctttcctcgctacctctgtgtgtttgtacatctatatgttttcttccaaatagcatcagtaaaacaaatctttgggccctctggaaaaatagaaagataaacagacagttgagagtccactctacagggtgacagttacgttcaggagtcgcctctttagatggtcatctgtcccctggatcttctttttggcctggtgtgtcttatatgtttacttagtctctgtgcctgagcatcaggcctggaaccaagagacctgcagatgcccttgtgcagtctcaatgcatatgacctcagaactgtcaaacatgaacatcacagcccttaatgccccacaccctgttggaccagcaattgccaggtttctttcggttcaaaagtttcctgtttaacatggcatggtggcacatacctgaaatcccaaacccttaggaaggtggtagaggcaggaagaccaggagttccaggacagccttggctatgtgaccagtctgaagtcagcctgggctacatgagaacttgtctcaaaatgaaaataagatctcagatataaggattcaaagagtgtagcgagtgagatctacgaatgtattctggtataaacaggagcttgtggaaggaagtacaagagagactgaaggagcggaggcagttttgatggctctcacgcaaagcagaaacgcttatgagcaaacaatgaatacagtctgctctctgtggatttccaatctgcagattcaaccaaccacacagatcgaaaatattattaaaacaaaaatgtgcatgtgttctgagcaggtatagacttgtgttattgtcctctaaacagtatgctacagcatctacttacatcgtcatcttagtacattatactgcatcaggtatcataggcaacgtggagatgactgtaaagtgcaaatgtaggctgtacataaattccacatgattatacataaggactgagcatccacgaattcatagagtcccagattcagtattctttgtgcaccaagggactgttgtggtatttggtacagtccagtgtgtctaaatttcatgatcctcctgcctcagccttctgagtgctagaggcatgggtcactatgcccagctagcctttcccttatgtttggtgtgtgtattgtctcttgacagttactctgtacctttatctcttcattgtctttcacaatgaaaaatcaaccaagaattttatgttcgtaatatagttctcaattaaaggcagaaatatatatatatagtgtatatgtgtgcaggcatctcttgcatatgtgtgtacatcagtgtggaggcccaaagtcaactttatgtgtcatttttcggtctctccctggcctgaggctagttgattttgcctaggctggctggtcagcaagccccaggaatctgccagcctctgtctccctagagatgggattatatgggattacaggcgcttagtgttatgcccagcttttcttcttttcatttattctctctctctttctctgtctctctctgtctctgtctctccctctctccnnnnnnnnnnnnnnnnnnnnnnnnnnnnnnnnnnnnnnnnnnnnnnnnnnnnnnnnnnnnnnnnnnnnnnnnnnnnnnnnnnnnnnnnnnnnnnnnnnnnnnnnnnnnnntctctctgtctctgtctctccctctctccctctccctccctccccacctccctccctcccttctatcctttctttctatgtgggtttggagttaatgaagtttgtacaatggatacttcgctaactgagccatctcctcagttttccaaagcagaatattatcaactgcctgcctacctatcacagttcaaaatatttaatcctatccttacaagagccatttagcttggctgctagcattttattttatatttgaagggaatgtggcgaatcacaagtcaggtagcttgcaggatagaaataagccagtgatgatgattcccagtcttgaaagcaatcatttgaaagtagtcggcagtggggtagcgtcagtcattgcctgttcaaaacagtagggcctattggaagaatctcaagccaggagtgtggtctaggctgggaagcctattgggaaggatcaaggcatcttctggcctctctgagtaggtagaagtagatggggagagtgggtatgaaaattgggatcaccattgaccccttctgaaggaagcaagcttggtagaatagctccgtgtctgctgtgatggcccatttcagctcattcagttgtgaatgacaaccctcttgtccctttgagaaagtagcattcactgggagagggggtgattcttagtacttgtgccatggttgctttggtccttaaaatatagttgctaagtatttagtgttctaggtgggtgattggcaggggagacatcagtgagcacagctcaaggatctcgggtgggtaaaaggaatcccagtgtgctactgtgttagtgtgtgctttaagtgcaaaacagttccaggagccagcactaaggacatgttggggattcaattgagggctattgagttaatgtagccagttgagggactgagggatagtgccaaacatttggaaactgagcctggacatcttttgatgactagatagtgagtccctttgctgtggtttcatgtgaggggagttaaaaaacagacttaagatttcagaatcggggcagaatggaggtcagagacatgacagatggctctataggtgaggctgcccaccattcttcagtctcttatcttgattagaaagctgtgattcttacaattccaaacttaatatgcccctaggaggttggcgtgttcttgcatgtctgaaattccagcactcaagagctcacacaggactgtgagttcaaggccagcctcagtcacgtactgaggtcctcttttagaagcaaaatgggacaaacttgagtaaaccgtgcctcacgtccaaggttattgataacctgagtatgtgagagactagttctaagaggtttggcattggagggctacctttccatttaaaaggctaatgtttaaaagagtatgcctgttatccaaagagtagcacaaatttccttttgttggtatccaacagcttttggaattgaataattacacaaagcaaggcccagttgtcctttgaaacatttatgtggtttgcactgagcctgcaagctgatattcatacagagatttttcatcagaggaaggcagaggaagtgaagagaaatctgattttgaggagttttgtatttatttgtttaattatgtcttatcaagaaacagagttgttgctgaacatagttgattaaacaatgtaaaaattttaaaagctcataatgacatatttgtatagtggtttgggaaagactccctcagctctgatcgtggattatcagaagtgaataaccattaaaacaatctgccattattttttcccccacaatgaatagttatgtcatcttattagcatgagtccagcctgtttctcagacaggcttgtgatgagtctcttttgagaccatcacaaagtgcagagaacttttagtgtctctgtacttcctcaccaccctcaaacacacaaaaaccaaggttcattgaaaatcaccaaaggtgataaaatgcctcccctccctccctccctccnnnnnnnnnnnnnnnnnnnnnnnnnnnnnnnnnnnnnnnnnnnnnnnnnnnnnnnnnnnnnnnnnnnnnnnnnnnnnnnnnnnnnnnnnnnnnnnnnnnnnnnnnnnnnnnnnnnnccctcccttctcttcccacctcattccctcccacccttccctctctcccttcctccctaggaattcccttctctgtctctcttctctctttctttccctctctcccttcctcctcactctttcctccttcccgttcttcttcctccccactccatctctctgtctctgtctctgtctctgtctctgtctctgtctctgtctctgtctctgtctctgtttctgtctcctttctctcccttgacaggccagccttgacactaagtacgaagtctttcttgcttccacccacctttcaagtcttgggactacaggcatgcaccatcacaaaggtttgcagtaaaattaaaaaagccatttcttgattttattttgatttttgatctttagcgtttggtcctgtagagacccaggcatggcaaacaaagcttgtttagtgttatttgcaacaatatttaatcacatttgttttgtgagaagaaagcaaagtcttggtctccatccgcacgttggatgtgaaatttgttagtccatccaaactgagtttaagtctctaatgtacatggatcattagatttgtaagtattgctaatggttctttctgttgtgtgtgttaatatgcccttcccgggtggtttctgtggagggtaatgcagggactgtgttagcataagtaactcaccagcaaattaacattgattaaaaattctattaagacagctggcagaagtcttttcacgttaagtacagttatgtttagatcagacttaatatttctgaggcgtttgctttgtttcccaatgtaactttctactaacaaaggggaccgttaacatttaaaggacttctactcttatatattcagcaaatgctctgggcgcaaatttgccaagattttagttagttttaaaaactgtcagatttgcttgtggagtttttgttgttgtttgtttgtttgtttgtttgttttgcagtgttttccctcttctaagtaaatgtccccctttggttcctatttaaattttcattcttaaaatttccctttccttggggggtttttagccgaaagtgtatttgagggctttaactttttttgtttgttttttgttttttgttttttgagacagggtttctctgtgtagccctggctgtcctggagctcactctgtagaccaggctgctcagaactcagaaatccgcctgcttctgcctcccgagtactgggattaaaggcgtgcgccaccacacctggcgggctttaactatttttaaaagaatattaggggctggagagatggcttagcagttaagagcactgactgctctaccagaggtcctgagttcaattcccagcaaacaaacacatggtggctcacaaccatctataatatgatccagtgccctcttctggtgtgtctgaagagagcaacagtgtactagaataaataaataaatattaccagttattcttatttagcaaggttgggctgcacagccctttctggttgtcaggaagtgtgggacgtcagctcccttgaagaggagggcagtgacctggacagcagttactgttgcaaacttatttagcttaaaaaaagaggaggggcttcgtgtatcctaggccggcctcagcctcctggacttctgacccccttgcttccacctcctgagtactctgtgtagaatataggatctaccattgattagtttgtgatctaacggctgtagaaggcagttgtctacttagataattaagaatgagaataaaggctggggttacaggatggagaggacacgcatggcttagaaggtattggggatggaacccagggtttcctgcgttctaccagctgagcagtagccccagccttgatcaaattgtttcttatggttttgttttgttttgttttgttttcaatcatcctgggatcgaagcaaactttgtaatggcctacagtataggtgtatagttaaatgttagactcaaaattaggctagaagtcaaaatttggactttgaactgaggaagagcgaaagaatttgggaatacaagggatgcagagttaacattttcaaaggctttctattttgcctaagccacggtaggagccgggtgtgacacaaagtcctggagaatcacacagtatcctttcagtactgaacattttcatctgttcttgatgcttgaagtaggatctgaatcccattagcatgtgtgttcctgtgcagaaacagataaagggtgtgctggctgatcttcgttgtcagtgtgacacacctgggaataaggaagtccagttgcctctattgcattgacctttgggcatgcccctgtggcattctcttgattgctaatggatataggggggcccagctcactgggaacggcatccttccttggaaggtgggcctggcctgaacatgaggctggaagcaagctggtaagctatgttcctccacagtctctgttcattcagttcctgcacttgaattcctacctggggtcctcaacttggattctaaaccctttcttcccctacgttgcttttggccaatgttttatcactgcaactgagagactaactaggacaaaggatgaatctgcataagtgagaacttgattctgtaagaccttgatggcatcttctggtgacctggggacagggaaaacggatttctctgtgtggttacttaccgcaggacatgtgaccctgagtgtgttcagtagttgtagactttgtgtagaatgaaggatgtaaaaattgattagttcgtgatctatttcctgaagaaggtaattgtccacttaaagaactaagaatgatcttgaagggacttactaagaaaggtgttttgaatctactacccctggatgaatagttggctttttgtaagatactgtaatgtctgtctgtctatctatctatctatctatctatctatctatctatctatctatcaaccggaatgttcttatccattgatgatccatctgtccatccatccatccatccatccatccatccatccatctatgcatccatccatccatccatccatccatccatccatccatccatccatccatctaatatactaagctaccctgtctggtcttggaacttagtcctctttcctcagcctcccaagtagatggattgtaggtgtcatcctccatattcaggaagactttcaacagtgtaaggtgtttcagctctgactgcaagggaaagtcacctggcctcctgggtctttaactttgtggttaatgcagtagccgctctgttatcttcagggtcttgtgacgtcatctttatcaagcccttaacttgttttctagatctctcttttctcttgattccctaagaccatatcacaaccttctttactatagttgcccataaatcttagctcagaaggtgttaattataagatatttgcttgtgagagatctcttgcctaatgtgctcataagacatacggtcagtacccccattaatgcaagaacaattaaatataaattatagttgattgagaactcctttactcccttttttagggtcatctacctgtgtatacttttctaaagcatatgtatgtatgtatgtatgtatgtatgtatgtatgtatgtataaacttagcattaggaagacaggaagacacaaacaggaaaaaaaattaagccaagaagacataaaagttccctttacttcaattaaaactgactatggtttccttcagaagtatatgaataattgtgactagcactcgatctttggattggcgcatgggaggtgtaataaatatggacaggttcttgcctcgtttaaacctgaactctcagagactcttacacaacaagccactaagagactcatcgttggcaggacccgccagtgtagacagtgcaatcagtgaagtattattttctgtcctgtcaactctgttgtctacattgtctgacacagtggtttggctctgagttagaacattccagtataccagctgtgttaatatgggttcttttttttttttttaaatcctttcttttttttttaatcttttttttttttgatttatttatttattatatgtaagtacactgtagctgtcttcagacactccagaagagggcgtcagatcttgttacgaatggttgtgagccaccatgtggttgctgggatttgaactccggaccttcggaagagcagtcgggtgctcttacccactgagccatctcaccagcccttaatatgggttcttgtgtgcccctctttatgcttctgatgaatcttgacatagacatctttttcctcattattccccttcccgaggatattaatagatttcctcagatgttttcatggtttagtaaaactaatggtttagtaaaattgtttttcttttaatttagcaccagagtggcttaagtttttggctcatttaagcagttatttcatgacagttgtagataaaaacaaaagcaatgaagacagtaatgaccatatttaaaaatgaaatttaagcaagtatttcttggtaaccataagagtggttcctatatggctcagtgttatggttttccatctcattcacttgtcgatggtttccctccctcttcactccatgagttcaacaaacccaggcaagcccacgtgcatgcctaatatgctgtggtgtctaatatgtaaactaactcatgtaatgcccaccaggtggcttatcatacgaatattgtgcttctctagattagaatccgtttgttattattgaggtttgcatttgaagacctaggggtgctccctgtgaacacattgataaattgttttttaatgagacaatgaactatcttcaaattctcaactctcttttggcatgctctactaaattgtatgcatcacagtttcttgctgtggttttaagctttcctttttggcaatgaatggcagaatgcctctctaaatctgctttgaaaacttttttttttaactatgggaaatttaagcacacccagtaataggcaaaagctcctatgttcgttcctcaaggttaactgcggtctgttcaaagccaatcttttgtttaatcaatatgccacccactttccctggcttttactgcttaaaagccaatcctagacatcaccatatcagttcatctgtaaatattttagcgtgtgtctctcatagataattctgcacatgtgtgtgtgtggggggggggatcgcttagaagtcatggcaattgaaaaggaggctttttatttattttcaatatggttttttaagaactggagccaaacattgatttaaaaaacactcccctagtggaagttaaatgcctcttccgaaaaatctgtggaatgagttaaaaactaaaattaaatcaacacctctactcagcacaatgtaccaaaaattaaagccagaagaaggggtgctctctattttagagtttaaaataataaaaatttgtgttttctttctttggtgggcctggaataagtactaaatttacatttagtatttttaaatttagtaggtttagtcccaggcatggtggcacccactggcatcccattaccagggaggtggaggcatgagatttgtaaattgatggtcagccatggctacaagatttgtacctcaaagaaaacaacagaacaacgaattagtaaatacgtccagtagcattttttccccataagtcacagcaacagccgccttgtattttctcagttttcatttgtatatgttaatttttggtacacatgaaagaattttctgtatcttgtcttgggttgatagtgagaaagttaagtcattgtattgagtgaattgattccctgctgtgctagtgatctttctcttggttgtgacaaggacttattttggtttgttgatttgaaaaggagatgcctagaaagaaatacagtctgtcacagcagggaaggcgtggcggaaggagaatgaaggagccagtcccatttctcttcagtcagaaacctgaggcagacagtaagcctgacctggtttttaaacctcaacctccctcccccacaaacgagtctctcctagctgggcttcacctcctaaaggttccataaccttccaaagcagttccacaagctggggacactacctgtgcgatccaacacgtatacaagtaattatgtctgcacactataagctcacacactcatatgcacatgaacacacgcacgcacgcacacacacacacacacacaccctccccaacaatgttcttcgacaagatacttatcctatcaaaaaaaaaggatggaatgccaatggatgagggacaccacacagtgagtctccaaatctctgcacacgggaaacttctgctctcttatccacttctgggaaaataccagggtttcacaacctcttctactcagacctttggtatgtataagagaaaggattaaattcagggacataatcaggtatttatacttaaagataatgctttttcatattattgctctgatcagctttcatcgttttttgtgcaaatggacagtaaaaaagtatttttattttattttgtgcatcagcagatacaaggttagatagcattgataattaattaattgcatgtgttgaggaatagtggaggcagggaagggtcttagcatgtgcaaagttcatgagatagcactcctggtggcattttttttctgcacagtaacatgctttatgataaagatttggtgggccagttgtatcagaagatgatggtgtggggacaggaggggagagatggagtgtgaagtgctagctgacctccgcagaggggtccttgcttatgttcctgctaatttgtgactggccacagtatcccctagaatcctgagtactgacttcctcactgacatgtggaggtgagtgggtggcttaagtctgcaggacccttggctgctgctctcctcagtgtcattccttctacctgcacagaactaaaagtgatgagttaacatttgacttttgtgtctgttttgtgtctgagtctcagtgttgaaagggcccagagaagagaaaagtactatagcacatatagaatccatgttgtaagaatcccatttgggggctggagagatagctcggtggttaggagcactgactgcttttccagaggtcctgagttcaattcccagcaaccacagggtggctcacaaccacctgcaatgggatcggatgccctcttctggtgtgtctgaagacagcaacagtgtacccacatacattaaataaataaataaacaaataaataataaataattaaaaaaaagaatcccatttggaattggcctggtagaggacatgccctgggtgatccacgggaccctcacattgaagctctgcttcagcgaaacaggcagacctgcgcatccctctctttggacaggtattactgaatgccctcagatggtaccagcagtcagtagtgtgactcctttataattgtcgatcctacctatagtgacacactcctgtgataagaaaacatctgagtaattctcttgggaaaagaaaagaaaaaagataaaccaaaatactacagacaaaaggtttggcaaatataagctcttcccgtgatttggggttgtgtttccactctgatgttccctgggtgtgtgtctgaggcagagaacaagtgtcagcaaccctgtctcactggcttgtttcattcataccatgggcccaagacattggagaagagctcataaaaggactcgaagtccttcgaggaagcaccagaccaaaaaaacaaaccaaaaaccagccattaattaatttttaagagtcagcagctgcacactcaggcatctggtttgataggaaaggaaaggaaaacaaatttcttggttttaaattgccttgtgtgtatgacagcatattaaaataatgagagcaattcatcttgccacgttgggcttgtcaagttttgctttctctgccccatcccgactctgtctctgtctttgtctctgtctctctgcatgtgtgtatactgcctgttagtatttgtgtgtctacgtgtgcgtatggatgtggaagctcgaggtgtgttcctggattgctctccatgctggatagtgaggcagagtctctcactgaacttggagcttgctcgtcctggctcacacagctccacagcttgcctctgagatccccggtctggggcttctgagttctgggattacagatgagcccccacacgtacccagttactactcaggtgctggggacctgagtctgatcctcatccatctggggcgagctctttaaccactttcccagctctgctctgcctccctccctgtcccttcctctctgcaggttcatccctatgctttatgtgctaggaaaagatagaacaacgatgtcaaggcaaacacaccatgaggttaccacaagcagatagttgagactctaccaattgcataagatacccagacaccaagctgcctccctgcagcatgcttgcttgctttcccaaaggcttatgtcaagtaaagaagacactcttaggtgtgccgcctagatgattctaaatgcagccaggtggacaatgaagattaaccatcagatgtgcaaactggcttctgaagggaaaccccagagaaatccttatctctaaggagagaattcagtggaatcaggcatgaacatcctgagtgtgcccccccccccacaccttgtgctcatgaatctgcttgttgtgagggtctcttcctgacaccaggcagcatttagtagccagacctgcacataacacagtgagcaggtacgggtgttgaaataattgctaccttctcagtgtgctttgtaagtctgggggaactttgtttttcgggtgactcatggccccgagtcatgctctcttcttggactacaactttcactgtgcttcacatggtttgctaattgaaccggaaatgaacattaatagttaatgtcactttatacattaaataaaacaaatttccatgaagatctgactccaaacttctacaccgattctgctgagggtcaagaaggccatacatttatgatgttgctgatatattttgatttttgtttttaatgatagatctcatagctataccaatagtcttttatttattcaaacagtctattgatgtacggtgtgggcagctctatgctgagacaccctgtgtccaggtctactgaggttcagttatctgatgacagccctcctgtcctcatgctcgaggggatatcctctttcttattttgttgctttttcttaaaaaaaaaatatttattatgtacacagcgttctccctgcatgtatgcctgcatgccagaagagggcgccagatctcattatagatcgttatgagccacctttgtggttgatgggaattgaactcaggacctctggaaaatcagacagtgttcttaacctcggagccatctctccagcctctattttgttgcttttaaaaataaaaattttgccgggtggtggtggcacatgcctttgatcccagcacttgggaggcagaggcaggcggatttctgagttcgaggccagcctagtctacatagtgagttccaggacagccagggctatacagagaaaccctgtctcgaaaaaattaactaactaactaactaaataaataaataaaaataaaaattttaggttatagtgaacaaattccattactcattccagattgtgatctacagttttgaatataaaggtccaggtgaggtccttgctcttaggccaagttctctaggaacattacagctgattctttgcagggccctctgctggtttgaatgagatgtggcctatagtctcaggcgtttgaatgcttgtttgtagccagacttttggctgctttatgggttcctcttctactacaacttttctccatcctcatcctttccaacagccaacagtaggtatggaaaaggaaggctggagaggaggggcgtcgatagcgttaggctccttcctgtttattagggcagtcgagtttttttttttggtcaatttcgatctttgtcttaaggatatctccaaacagcagcaggaagaatagcggcagcggccacactcctctcagggatccagcatttttgtaccctctcaagagtccccagaatttcatatacttgccaaaactatttgtttctggcaaatcacagtctgctgctgtgaacagacggaagaaaccccatatcccacccctgggatttctgtgtttttaaaacaaccaaaattctcactgtacaatccccagttgtgggtggtgtttgggtgagaataggaggcgtggccttgttggaggaggtgtgcctcgggggttgagctttgagctcttaaaagaccactctgagtttgctgtctgcctgctagaggttcaaggtgtgagctctcagctgccccagcttctgtgcctgctttgtcatgatgtaaacagggcagagtgtggggttgcatgggaaggtagatgggacagccagaaccagtgagacccaggttcatcgagagaccctatctcaaaaagataaggtggaggacagttgaggaagacatgtgatgctgacccctggctgacgcaagcatgcaccggcatacacaatgtacataaaacacagccacacatacccacagatattttgactagtttttaatgctatcgtaaacaaactaatacatgacccaaaactccctcaaataaggactatgggtagatagatgaacatgttctttgggaaagcagacaggcagagctcgctgcattagcactggagaatgagtaaacatgggagttctttggtcataccagacatagcgaagcaatcataaacacccacaaagccacgcatttagcttgtacatttgtactcgatttcttttttaatcttggcactgcctataggattaaggaaatctgtgtttagttcttgttttcagtttggtgaatagtagctatgacttggaatcaagagatgcttttatttaaaataaatatgttagtgtcataggggcagtgttgttggttgactctgtcttctcgggctgaggggataagcctccgtggctgcccgtagtgccccaaaggtttgttgctacaggactagtgtgagcttcctctctgagtaggcaggggaccaaagttttctggggacagtaaaaagcctagtcctggaggacctggatcctgcccagacttctatgcctggatctggtggagaggacagggcagagatttagaaagagtccttcttcatcttacacacagagatgagcttggtggcacgtgacagatgccagacttatcattagagaaacacatagacacatctctgtgctcagggaattttctggcatgtacgtgtgtgtttgtgggtagtgggactttctgtggagttgtcatgtttcttgaaagcttgtatacttagaatttggccatatgatattaagaaattcatgtgagtttgaggtcagcctagtctacctaaggagttccaggacagccagagatacataatggacagaccctatctcaaaaatataatactcatgggcacctcaaacagtaacaactttttaaagaggacttgattatgcagatatccttcaggtggggcatgtgagctagaccctgacaaatgacgacatccttagctggcaggcacaggtaaactcaccaacttcgtgatttcagataccacgatagctgtctttacggttcatttagttatcaacacgttatcaccgtttgtatttttcatgaaaacaacggaacaccgcagatgctcaagggcctggctgtggcaagtgtgtccaggggtccttgtggattgcagtagcagcgctgagctgataatgagttaagtctttgggatggccttggactcctctgctttgtgggtgccagtctgtgtccgtgctttctgtctgggttcgttctccaggctgcctctggtctgttgttgagttcttccttaggcttcctggttgggcggtgtaggctgtgtcatctgctcatctccgcctgattttctcgcagaagcctgtggctgcgcttgcctgtcttctggtccacatctaagttatcttactgcgcctcttccactgccctctcccagtcagatgcatcactattttctttgccaatctgataaaaatccaacagtcctagtcactaattagaacgctgtgtaaacacaagtcttgctgagggaggtcaggcgtttgtcccccgtaaagcattttaccatctgttttcagtgtgttcctctgtgtgtgtcttctgctgtgatcaagtaggccaaactcagcttcccattcccccagaaactgggaaatatttccagcttttcttgtgtgttcattgtccagacatgtgtctggacctaaatgatgtctatacctgaatgtttaagtagtagctccagctgcttatgtagggctaactatttggtttgtcactgtttctctctctctctctctctctctctctctctcactctctctctcactcactctctctctctctctctctcgccctctctctttctttgtgtgtgtgtgtggggggcacggatgtgggtatatgtatgggcgcatggtcctttgggtgcacatgtatgtgtgcacatggaggccagagtcgagcttggatgttattctttaggatgccttttctttgtgttggagacaaggttttattagcctggtgctccctgactcagctaggctggctgccaggcaagttcctagacagactcacctgcctttctcccctgggttttaagatttgaagtgcatgctactttgcttggcttttcacgtgagttctggagatgaaacccagaaccttatactttcagggcaagcgttttaaaatctaaactgtcttctctgctgccgtctgtattattcatgttcagcctagggggagtcgggggaggggactgtcactgtccctgtttgcagaagaggaatgggaaagcaaggtgcttcatgaagagcacacagatattgagcgtgcagcttagatttaaactgatttggaattttttggcataaattctagtcggtgttttctggtgaaccaaatcagttagaatgaagacacgcagagacatcttttaaggaatggtttaccaatttcagaggccatgccagctacttttgtatccttgggactgaaaacccattaacatcaacttaaaggtttactttggttcatattttaagaagttttgatttgtaatttctaagctgtgtgctcttgggaagagactttgatggtagtgggtcatgtggcagagtttttcaaattctgatagatcagggaacagagaaggggctatagacagagacagatgactgaaacctgtctctagtaatgatatactgctgccagctaggtcccaagtgctaaaagagccacagcctcctaagactagactggcatagcatccaaaacctgagcctacgtctgtggtctaaacagaggtggaaaggtagagagattcaggagagctgatgacagaatttctagacagtccaacatagctgagaatcagaagaccagtagtaccacttcaggacaaaagccagcaagctgcaacccacgaagaccaatcactacttcagtttccttggaaggcagggaaaaagccctggttctagatggaaggcagacagcaggagggagtcttcactcaggaaggtccacctttgaattttattcattcttgtctacagttgactgtatgagcctgcccctattgcaaagatagtctgccttattgactcaaccgattcatatcgtaatcttatccatacatacccagaataatgtgtgaagaaggatcttgacaccatagccagtcaacacatgaatagctgccatggtggatcttgctatcttgtgttgtgtatgtgtgtgggtgtacagacacatgcacacactgatgaatggaatctggcgttctgtgccctttgcagtgatgatgtccttgtctttgtgaatagccacgccaggctggttgtgtaataatctcagagagtgagcttgaattccaagtcctagaaatcttgcactcacttagaagtggaacaagtgatgctagttcctgagaggatcttgggttttgtctgaaagttgccttgagcttcatcgttgtgcctttgacagactgatcatgaagtcatgggcattgctagaaatgtcttttctataagcgataatgggcagatgcatcattttgctactgggaaagcagaaacctgctgaagctgttccatgttacatgctgatcagtgctgtgcctcccagtgagtacgcgcttcactcttttctcttgaaaataaagcgtttggaagcaactctaaaacttaaagagacagcgattgtacttcaggcttttattaaatgttctgccttgaatttttcaatctggattaatttcagtgttgtttggctctgtttcctatgatgtgtttgcatatgtgtgcaggtgcacacgcatgtacagaggtcaggctttgacactagatgtcaccgtcagttgctttggctattggcattaatatttaattaattgtctttcagtgtcctaagttttggctaggctggctgatcagcgagttctggtgccaatctcttgccacccctctcagtactaggtgagctatgtatgctcccatggccagcttttgggaatcagagctcaggggctcaagtgtgctcagcaggttctctcctgcctgagtgtccccagctccaatttgacattatcaaaaaatggcaaaagtcatgaaagtgaacctatcaaataaacaaatgtggtaaaaagggaaacttctcttccctattctccttcaaactcacttagaaataactgatatgcatttgagggatccagttctgtgcatttgacgttagacgtttagccgagtggcgaagtgtcttgagttgtgtggtgccatcagaactcggagcactccggcactcggctggctcttcacagcccgatttatctagtcctccgtggatgtttgcctcttctgtgttgccaagcagagtttatagtgtgaacgtgcagtactttacagttcaccctcattatgatcagtagacatatgggttgttctgggcttggctcctgagcatggggaacaactgcttcgagggcaagtctttcaagcttcgaagtcccttctggaacggaattcagcgtatcgtatagtttctgtcctcagaggaaggcgggaggcttcatgctcacgtgcttccaccattcgacgtagctgaatatgggagcatcatcaactctctggcaaggtttttcctttctgtctcatgaaattcaggtatagagtagcgccacctggtcagcagttaacatctcagttgtagggttttatgattaactctatcttcaggttttataacttcctatctgggaagaatcagtagtaccattctaatatgcagacagcttttctgaaggctgccacagctgccaaagaaacaatcactaaggggaggctgggtggcccagagcagttccccttggctaatctgagagttcttggtgagtatttatagacggatgtatacctgaagccccagagatggctggacagcaggtttttttctggcgcgttgcctagactgcgggattttaggcaacacttttagatgctccccattcagtgtttctttactaacctttcacaccgggctcaagcatctctgtgcgactctgccgtcctgatttgtatctggtaaagaggtagaagatgccctctcaggctccccaggtcagcagtcagttgccctggtgggggtggggagaagggagagtggactgttgcggcggccctgcctcagtctctcagagccaggcttacatcattacgcatgcactcctggctgctcatggcttgaagatggtccgattttgtaagtaatcttaaaaaaaaaaatcatcctggacaaggaaaatgaaaagactttttttttaaactattgatttctgcagtggaaggaaataatttgagtgagctacaaatgatcttcgcaggcatcactgtgccagcccctttcttggactgtcctctcgccgtagcatgggaataaatccagtttttaaaagaggcattaaaaagtgctgtgacaagtgtagttacagcggatagatttagctcgtgtattttatctgcataatctgattgtaatttatatgtcttcagcccagataaggcaaagccatttcttattaccaaattcttctctttgtcaacatgatgtgagctggatattgactttaactgaaggctggtgattaatcatagcagcttgcggggagatcatttattgctttgtgtagctgagtgactgctggtggagctgagagtcaatcacgataaacccaagcgggttagttgttcttggctgacaatggatgacgtgatggatttattagccatattctcgattaaagatctctctaggttcctagccaggcagatagcaaagaggaaaataacaagccactatcaagggaagaatgtgcttgtttgcaaagtggagatgagccaaaggcctgtcatgggagacggtgaattgggatgatagcgccactgttactactcaagttcaaacatggcggtggtgttcatggtcatctgggcactggctagactaggaagaaaaagtcatcatatgaagttatacaggtgctatgagaacttatttctaatttattgttaaacattatcgccctgacaaaagtctgcccctcaggctgagcgtctcacttgctcacataccttggctgtatttcccctttgtagaacgtggtatttctaggaactgtatagctacttaatgctaactaaggaaaagaagattctagggcccggtaagctggctcagtgggcaaagtactagccatagaagccagaacaacctgagttatagccctggtacccacatataggtagaaggagagaaccaactgtataaagttgtcctctgatgtcaacacgtggactgtgacacctgctcaccaatacatgtctgatatatacacaataatgctagtaaataaaacaggaaaaaaatagaacatgcaagggaagatttacacagttggaagaaagaagcccagcaggcattatccaaatcaaatggcagtgagtctaggggttatcctgtctgtttgtcaatttactcttgattcctcttttttattgaagattgaagtgcctactagtttattgaaatgcctagagcactacacagtatgttagtcaatagcctactgcctcttctgttgcttggggagtctaggacagtgacaatgttctatggagtcagaagtgcatgtgtacgggcacagtcagttgcacaagatgggcgagtgttggaagtgtccacttgtgcttgtgagtgctcagctcctgagatttctccagtctttgcatcttcttgcaccttgtccattctggcctacgatgtgtcctggttggagaggcatttcttttgtgtgtgtaagtggtgtatatgtgtatatacgtatgcagatgtatatacaggcgcaagagcacacgtgggtgctagggatatgtggaattgatgtctgttaccgacttcgcttatttttcaccatcttgtgtttggagacagggtctctccctgaacctgaagctcatgggtttctcattgctctcctccactttgcgattacagatgggtgtctctgttccaggctttctacatgagttctgtaacttgaaagcaggccttcttgcttgtgtggcaaacttttcctaactgagctctcttccctcaccctggagaggcatttctaaggctttaataaagttttgctatttggctggagagtagccgggctgttatgttaatatatatgtttgaagctatttccaagtgctctgtctgaaccattggtttccaattggggaagatttgccacctagttacctttcaaattttctgggaacgagttatgttgtcacagcagggggaggtattcctggcattaatgggagagtctcaggatactgctaagtgtatggagcgcatacaacagcttctggccaaggatcttctggcctcaaatagcagtagtgttagcttgagccactggccttagctatagccatctccagatttggttgctaagagcttatgattcctggacaagtggatattaggttgtccttagagacaatgtctagatagggacctcttgcactcttttattttagttttggtcttttaaagctcaaattgccccatcttctcttggctgaagaaataatagttgcaaagtgattgggaaatgtgttcccttcccctcatctggcgtgaatgttttcttccacacaagctgatgaattgctgcttctgcggctgactcgagagtttttgtttgttaactgcgaatctcacctggctggtcttagtgttaacgagaagaaaagcatcagttaatatctgttacattttattgctgaaaactaattgttagtggaaaagcctccccccatcccctcccctcccccaccaaacataatttggtctgtaattgatagaagaaagccgggggaacttgtccaggctctcatgacagctggtcttccctagtggtccccatgtgttagtgcacatggcttctgcttctatgatcaagcaggcagaacttatagttagtgttaaacacgactttgtggcagcagcagagcggcgtattcctttgcacgttttaggcctttcgtgagcctttctccgtcgtacttccagacgcactattgccaaacttttgctttgttttaagggtcgtagaggacaggaccttagggatttactcatttgaaatttcctgtttacttattgagaggaaaaaaagtagaggcagaatccggggctaaggatgcagttccgtgggtagagagagttcttttctatgtagactataggaagccttgggttctacactgagcactgcataagcttgggatgagaacacacacaggggacaggggacaggggacaggggacaggggacagggaacaggggaacaggggatggtagcaggagagtcagaagtcaaaggcagttcttggctgcataaggaaggcaaagctagcctgggctatatgagcctgtttcaaacgataaaataaaataaaataggcattcgagaccctcaacaatggggccctgaggagtgagagctttcttaggaatctcatgctgagaaaggatgaagcctaatgccaactaagaggaggtgcttgtctctacacacacacacacacacacacacacacacacacacacacaccacacaccacaccacaccacaccacaccacaccacacacacacacacacacacacacacacacacacacacacacacatgaatgtgtgtgggcacatgcatgcacacaagcacaccacacattgtctgaacgcacccatacagccttacactcaagtttataagcgtatgaactctgtgaagcttgtcacggatagccagttaataacatttactttagactaggatataataacctggtcaaacaggctttagaaactgagtgtttgggattaaagaattggcctggctgttagatgtttggttaggcagagtgctgtgctagctcaagagttgaagaacccgaggtgggtgctagaatcatgcgaaaagagtgtgcctcagttcccatgcatctctaggggtgttcagggcacgagaaaagatcagcatggttagggttgggactgcccctctgggcagaggctgcgcacacagattgtactgcttccttttccaggaagacactaggaagaaaaagcccattactgttcctgggggatactgggtctttccaggttgtgcagaattctaattattctagataaaaaggaatctgcccctcactgtttaaaggaaaataggttcattgtgagcaatgggctctgtcaatcaacttccgtctcaatttatcctaaatgatctccccaggacacttgagtttgttctagaatgcatccaaataagaaattgcttaacgcatgtgcagttgagtgagatttgtaaatgcgttgtacttagttgtatttcgacggacacatgtgtctgtttgattgccttctcattttgcatgtgcttgtatgtgtttaggatgagtgtgcccatacctgtggcagccagaggacagcccgtgttgttcttcaggatccacgcccaccaatggtggcgtttgttaggacagacttgtcatttgtttgagactttagggcattgaaggctaaatagtgactgaaatagttctcttaaaatgcacaaaatttctgagaactgtctcagtgctgtttttaagagaaggcggttagtgtagatataccaggccccttcctagtgtcccatggtaagggacagtcagaagatcccagtatccctggcattaccagaggcaaatttcagcactatctccactgctacccccttctctagtgctcaggacaatttaaattccacagttgtttgtgtcttcacgatatgctcgcatacttgagaattttaccgtaaatgataacttggactacgtgtttatcagcaatagccctgaagaggaaaatgaatggttttctcttgtatgcagacaaaaattctgtgaagcgcggggccccttattactttatttgtgttgtgatgtgtatgctgcaaaatccatattttccaaagacacttctatatgttgtcccaatcttgacatttttaaatagataggtgctctcctgatgttctgcctacctaggacagctttatctatttataaacaattggagggactgagggctaggaggcttgcagccgactgtcttctcttcttctctaagagcaagagttagttaagaaccgtggaaatgggaggtctttgtgtacaaagcagaaggcaagcgcaagtgtcagttaatttactgcgtgtgtccttaccttcgtctcagtaactgagtagtgtagccgggctaatggcatagtcgacagggaaggtagcttagtggctgagcatttctaaggctctgagtttaagccttcatcactgtgagaaaaaaaaaaaaagaaccaaactatttttaaaagaactgctctagcattgaaaaaaagtgattttgatagttttctactgaatgcaacagaactcatgaacatcgttttccctccacatattaatatacgtatttccatatgtaaaaataaggaaaattgtattctaaatggggcatggagaccctaggtggaaaaggagtaagaggcaggcctgggatgttgctgtgggttgcaaaaccaggctttgcatctctataggagggtgacatggtgatggtttttattccagacttgataggatctgggtgagcggtacctgaaatgcatgtttacggtggttaaagatggggttgggttgccgactagatccagtctgatgccagttttgttaaaacttgttgaaactttacaaaatattttatttgtgtgtgtgtgtgtgtgtgtgtgtgtgtgtgtgtgtgtgtgtgtgtgnnnnnnnnnnnnnnnnnnnnnnnnncctggaactggagctcacttctgaactgcggtctgggtgctgggagcctacctgtggtcctcaggaagagtagcaaccccctcccagtgccagatggtgaggctagcacttggccccacacctgcttcccctcccctcccctccccttcccctttttcctttccccctcctcctctggagaaggaactcaagtcctcatgtgttcacagcaagcgctgtacacaatgagtcctgtccccccgcccagcagtactgtctgccttttatagatgacttcttcaatggcctccttccttttttttacagtgctgtgttccttgttttccagtctacgcttttgtgcctcgacgcagaaagcacctgtttttttctattttacaatctttgtttccactcagacgtctgtagtcttgtacgattgctctcacgcagggacctccagtgtgtgaagtgtcagtgctggtgttctcagctgtccactaaacaccatttttcagtgatgtatgttcgccctgcctctccccaacctttcttcaagccgtgctgtcaccctcattaccatgcactgtttcttctttcttgagccccaccccctttcctcctactctttaagcctgttatgtagttcttgacttagctgtgctttcccactgagcaatatcgctctgatgttttctttacagattttccaaactgctgccatgtcttcactgttgtttgagacgggtgtcaaagcagtttcaggccctcagccagggccatagactctccctctccagatgcccaggcgcatggtgggtaggaagccctgtatttgataacaggtctgtggctgtaacttcattactcctcacttaatcatcaggtgtgaaattcagaaaaaaaaatactgaagtaacatcaatgtacagaagtctgcgatgatttgccactgatgggttgaggtgtttgttttttctctcttctctcacaagctatcaaagacaagtactcagactggacagacttcctcatccgtgaattgactggttctcggacagcccctgcaaaccttctggaaggtgtatgtattgctattattcatctattatagccctgaagcagcccggtcctctgctgtctagtggcaccttcgcgtatatccttctgcggatacatgtggacacagatgtctttattctcacagcataacttcctgtttattaactgaattccataggtgatggatttgagtgtgatcgactgatgttttcctgtattatagtcaataattgggaagttttctctgtttgagttcattttaaagccatgtgccagagtgccttcccatccccctcaagcctcagcttgcaggataacttgggtggcaggagaggagtaagcatagtcctgtgcttaccgtagtctccgggagcccactaataagtagcgccattcattgctcatctcgagtgcgtaataactccatgctctctcacatatgtgctacccaagactattgattagcaatctccataaaacaagaggagttaccactgactgtattaaagtgtggctcaggcagattttaggcataggagcagaagagtttaacatcaagtcttgatggtttgtctgaaaatgtgataatgaaacattaataattctaatatgtacttgaacaggaagacaaaggcaatatgtcgtatgtaattattaaattaccaactctgtcctaagggtacactggaaaggggaatcctaaatgaatgattggggatagatgcggattttcattattgttactaatggtggtgttgttgcggataagatacagattttcattattgttactattgttattattattattaaccttcattttcttccttggcaatggtattaatacttatgacagctgctatgtgatatggcgtacacaaatgttttatgttgacttttcctgataatgtttatcttaatggctgtttttgaccactgggttaaaagacggctatagtaagagttgtcttaccatgttaactgttaaacacgcttccctaagtagccagctagagaggcactcttcacatgccaagaaaagtttactcagaaagggcagtacttaacggttttccaaaccaatgcccaagttaagcagcagaacaacttaatatagccaaacgtgaaaaagaaaaaaataatgcctgctcttatactcccagtactggggaagcagaggcaggcagatgcctggggttcactggctagccagcctttcttaatcctgagtcccaggctagagagagaccccatccctctcaaaaaatggtaagcaatgactcaggagcagcacttaagattgccctccggcctccacacttgcacaaatgtgtctcagatgtgtcacctgcacatacatctgcatgcattcagttaatctgtatatgacagggttctggctgctgttagatgtacggtgacctcttaagaagtcgtggtataaatttacagccctatattagatacatctgtcaatttgaagagaaaagtagacattttgttatcagttgttcttgctctggtgcatctgagaataattttgctaaaaacatgtgctaatttctaataaatgcaattttatttgggaaggttaatttgtttgattaaaacaatggcataaactgttgctttccatccacttgtgatttttgctgttggaaatggtgttggtttatggatgtgtagaggaggaagggggttgggggtggcggctgtgcaggggatatcaggatgtttgggaaccgcttggatgatggcgtgggaaaaaatgattatcttctgctgtcatctgtttccatgggaaccttaaaaaatcaagtttaaaatacggagttttgcttctgtttgaacagcctctgcgagggaaaggccctatagacctcattacagttgattccttaatagagctgcaggactcccagaatccctttcagtactggatagttagtgtgactgagaatgtcggtggaagattacgccttcgctatgtgggactggagcacaccgaatcctatgaccggtggttattttacttggattacagacttcgaccaattggttggtgtcaagaaaataaatacagaatggatccaccttcaggtgagaggcggcattttctttcctctgtgacgtgcttgtgatagagatgtcaaactcctgtgggtgtgtctcgggacacacctgctcatgtgtcttttacatgccagtatgtggaacctaagtgtgtcagtgtcagagtctttagggtagaaaataagatccaagatacggatcagaagcattctcaaaggagaactccatgttgatgacaacatcagtcaactcaaccagcaggtcagattccaatggtgtcaatggctcagaaaagaaaggaaggggtgatcagctgggatttcgcatagtctccccatcccttagggaccgtggtcttggaagcatattccacaatctgtttgcatgcccatctttctgactgcctgttttctgttcacccttccaccccttcttctgtccatattcatctgtccacccatatatgcagctatgtagtgtgtagtaatgtatccatttatgcaatctgtcttctatcatacattcctcttctgtcttcctttctccttcctttgtgtcagttcatctatacccactgtctacccacattcatctcgttccccacactcccacgtaacacttattcacttaacaccctcccacttttacacgcagacacttgctctctatccatctatatccattcacttgcccaggttcatccttaatactgtgcatccgctgcagccttgtcatctacttactcacacaactatgtaccacccattcacatgtatgttatatgtatgacctatgtatctatgtgtctgtctgtctgtctatcatctgttttacatccatccatcgatcaaaatttcatatcacttgctcatcattatatagtaaaggaaacagaaataaaagagttaatctgttcttttcctctgccaagcaagttatcaattgtaggtagcttcaggggtactgccaaatggctttgcataggcctaatgggatagaacagtgtgttctgccctctgatagatctaattagtcaaaaaaaaacccttccatttataggataaccatttgtaaatattcattatattctatgagattctacatttacatctgttacgttgttaattttgattccaaaaatgtggtgccttttggcgcaggtctctttctacagccattgaagttgctattgcgactgtgtaagcgacttttccacggtcccccagctcgtagggatcagcctgtgtgttgctattggaatccccaggtcctaggccccacatatctcattgcctctgttgacctcttacctttgggtgaaaaacctcagaacaaaaatgtcaccttgttcatgcgtttaagcatgccaaggaagaaatatttccttctggcagatttttattttgtggtcagccttataggtatatttagagtgagtaattagtttccagcttcattcaaattgctcctctgttggttgccagtgtgagtcttgtgcgctccaaagtgagaagctctgtttaacttacctgtcactcaggggctttggctgtggaacatttcctggtgctggactccatgtatttgcatccgtgttaaatctgacaggcgcatgacgtgtaacttgtttttgttgttgttgtttttttttttttgagacagggtttctctgtatagccctggctgtcctggaactcactttgtagatcaggctggcctcgaactcagaaatccacctgcctctgcctcccgagtgctggggttaaaggcgtgcgcaactcggtattttataatagctgtattgttgctgtccacataagaagcagccgagaaatccttttatgccttaagcattcggtgtagtaacaaacaaaggtcctgtccctgctgtgagaaaagactgagcttaggtttgcctggggattcataacctggcaggagaaatttacttgtggagaaaggtgattgtgtaaatctcagcccagtgcctaattgcttaataaattctacaaggaacttatccgtgccagtgcaaggatttatagttaaagcaaagaatttccagtcgcttcttatgctctttgatcttctttttttcctccttcctatgaaatccgggactacacctccaatgcttgaatggaaaaaaaaatctccctttaagaaatacttgcttcggagtgttgctcagcttcaagatgcctagatctatctttacaaagcacgaataaattgtgctatctgtccttatgtctctggacataatgttgatttcacagaagactttatgagcttgtctaaagacaggaaaagtgatttgtcgagagttcatttccccaactgttaaaatgttggcatgaatgcttgtataggggagagagaaagcaaaaggcaaaacgtcactcatttacagtagttacaagatgaaaactggactctgttacctcattcagtgaaacagttccccctgagaaaagaggcaattattaccgcaaattttcacttgggaacagaacccgatatgttaagatttgtgcaaattaatttcaaatcctagggtgctttgtgccacttacatgacaacaccattttctgaactgaaatgacattgtgaataaaatttcagagagtatagaaagtattaggctgattctcttattcccagacactactaaaccaatacaaaattacccagcattaagatccaagggagaagagtggagctgcagaggtgaaaggcattgtgggaaattccatagcctttgtttgttgtgaggggggctgtggaaggtgagatgcccttgcatctcactaatgcatccccaccgttgtaagtaatccccactctccaacttttaccttttaaaggacatttccttccttgaacagagagaatagaaacaggtagcagaagtggctgagacgctgggcactctaggagatgtactgggttttatactgaccatgtctgaggatctagccttgtggggcattccatgtctggctggtctcttgtacctgaaagcaagtgaaggcaccccgccctgcagtgtgggagcacttatgccattgtgctgagcatgttggatgcagcaaatgactgacatccagtttaaactatgtccagagtactgtggccagctttcgctttttcaagaagctcatgaagtcaggggtaggttgagtaacctcacttgcttttttgtctgtgcttgcttagaagacatgatatgtgtttggaacttacagaagccaagggaaaaaaaattctgtccttttctctccagtctctttttttcctgacctctcccatgttaatttcttttaaaaaaatccaccctttcaaaaattagacaaaacaaaacaaaaattaaaaaaaaaaaactagattgatcctggaatcaggaaatttctgaatagaactgacatgcttcttgcttaaactgtttctgttttctaaagacttgggttgcttaaacagctgacactcattttatcatgattctaagtgtggaaagctgaaacaagagtgcccacctgtccgggggtttggttaggactcctttcttggctcccaagtggccaccatctctctagctctagagttcattagagcacgcacaccaatttcccttcatgggccatcccagcaggtccctcttaatcctcatcaccaccagatgtcacactggagattcgaggttatgtaggcattcaggagaacacagatttagctcataacatttcctcagatttcttatctcttaataaataaccattggtccatctttcctcactggtcatcttttcggtggacctggtagtgaaggaggaaaatgattcattgtgatgggtagacacatggaaatggggccaaccatttatttatttgtttatttgtggtgatatggttgctttctgcaacactctctaccagagcttgccaaacttttgcataaagggaggtctcctcactttcctgcaggctcctggttacagatgggtgagaactatctttttaattgtttatgacttcccacgacctgtaaatggagtcagatgaacagttttaaattccctgcagtgcaggccactttgagaacaaattttatgtccttttaatggagctgtttattgtccataaattctctggtgtacccaggtgtctctgtctcctaaaacacacacaggggacattgttctctgtgtattgcacctcggaggtgttcagtcatcacaggtggtagagacgcctgccccaactgggtttagttttgcagaaaagagagtgctttgccatgggattagattccacttttctcattgctatgacgaaatactcaacaaaagcaactcaaggaaggaagtgttttcatgagcttacagtttgagtgtctaacacaaaggaaaggggattgtagctgcagaagatcacatgtatttttggctcataaaaaatgtcagattagggaaaaagtatgctagagatagaaagcactaggtgaaaggctagaaaaactatcagacaaatagaagctactgtacctgaacctccctctgtccaacagcaggaggcagggtgtctgtaacatggctaagtctgggaagacctttcaccaactataattatactccccgccccccaagaaaaaaccctaaataaactgctatcataaaggagcttcaagctcaaggtgaggttagaagccgcagagatccgaatatatgtcttcttgctcaaaagcaggcatgtaagaaattaaaaatatagcccaaaggtttaatgttgccttttaagtgtacttaaattcatattcatattctaacagtctgtctgaggcagccagggttgatttagggatgatgatataaacacatctacttccagcaagagcctccacaaatcccgttttgataaggtcttaaatctgttgtgatcaggccataaaattccactacagtttcggcaacatgtgaaaactactcaactttttcttcttcttcttttaattttgcatgcagactgtataacctttgtgtgtaaatcttccctcttccccagtgcctagggggaaatatggtcaacatgtggtaggaacatttcaagtataaatataaatttttgtttgtatattttaatttaggttttaataatttttctgactttttttttagcatatgtgagcttagagacttagtgggaaatgtgttataataactgtaggtaccagacaagagctattaagaggttagacatttatcagagagtgagttctccatctgtggccggacgttgttaggtgatatgtagaactgtggctatagatgatggaaagtcttgctaatgtgattaatgccattaaattacgtacagaaggccaatagaatgcatacaaatgttccccgtggaagagccctgttaagtattctccatttctgacagcagctctttaattttagagaatccctttagcaagtggctgcttacggggcagtctgagtggctgaccctgccaagaactgtgggaaggtaaaatctaaagaagcaactaacagagcgtcagtccctaacttctttgtggcttgcccttgatacagaactttattatctgaagttgcctttcgagtggaaatgtgctctggaaaaagccctagttcttgctgcagagtctcctcttccaatggaagtatttaaggtgagtgacgaatatgatcaatttctctttccctttctctctcttcacctttttcaaatgtaaactaaacctttgaagagttgttgcaatgtcattggggaatgctcttgccaggcctgtgcacgaggccctgagtttgaatccctagcacccatgcaaaagctgaatgtataattgtgatactcttagggtgggatggaacgaggcagagactggagaatttcaggaaactcgtgggccagctgacctggcaggtggcactgtgagcaactgacattgtctaggctgacacctgaagatgtctccttgtttgcataggcgaactctggcatcagtgtgtctgcatgcacatacatgggcacacatacacccacgtttagtacacacatacatattctgcacacatatgtcacacccacaaatttgagagaagaaaaggaaagctactgtctagtaaattatgtaccgtagttaggagattgtctgcttttcccatttccattttaaactctgaaaattgtgtctgctccccattactattttaaaaatgattttccgtaaatattcatattataggatattggttaaaagatttttgtttattcttctccgtgatgaaaattccatttttatcttcttcttccctactgaagcaagaacagaaacgacattgtctagttttactcatttgtatttttgcgtttttgaagggattgaaaacgagggcagtggtgacagtgtatagtgtgtaaagcatttgtgtcaccagcgtgagaacctgagtttgagtttcttaggacccatggaaaaggggacacacgcacacacttgtaatcttagcacttgggaggtagcgagaagtagaggattctgtggacacacacacacacacacacacacacacacacacacagagagagagagagagagagagagagagagagactgagagcgagctcattccagcctagccagtggcaaggagataggtatatttttttagactcatttttctcaatcgctgatgagtctttttctgaggtgtctgctacataccaggcttctgccagatcctcctacagcaacgactggagtaggaaccgtatttcaacagcagtggactgtcaaactcttaactcttttaaaatcactcggccagcttgggcattgccttcttgcttattctgagaggctagggagagggtactggtcttccagcgtgggctctcactgtccacacttggtgaggctttgctggcctttacttttgccagcaactggtgaagagttcacactgttgacagggttaactctgggcctttctgctccgttttgggtttgctgaactggttaaattaggtccttgttcatcggctgttttcattttccccacacctcggtggctgcggagcgggctcatctcttacaaccaaaacaagcaaaactcctctgcactgtagttagacttactctttaggacataaacttgaggtgggttttggcagacaccttagttgacggttgttgctttcagaactctttgttgttgagggttttatgccaaacactgccgcctcgtgtctctaaggcctgtcaagtctagtacggcgcttgcccttgaagtctcctgcaatgatgagcctccttggattcccagggtaccacgaagcaggtcttttatgttcttctaattccctttgtaccagtgttattctttctgtcaaattagtactcatcttccaattgcaaatataaatcttctaaagaattctgtatctggcctgcgtccgaagccttaacgaagttccatgaccagtttctgtgtcatcccctgtgccacaatgatatgtagtcattgctgtggttctgtgcctaacgtgaaactccaggaagaaaggggctatatgttttgtgcatggttggaaacagaattcctaccacttaataactatttgtcaaataaattaacagattcctgaatggaccacatacatttaactcactggatttaaaaattctgagttaatatatttatagattaattgaacatataactatacttagaattgtgaacattaagacttgaaaggcagaaacattaataatcttgatctgtttttaattaaaaaggaactgattcattaaacatttattgaacagctactcgctgcaaaagaccattatgtcttgttgccctgattccaggatttaatttaagttcgtctatattttctaaaatataatcatcttcttttcttaccttcaattcatcctatgagaattcagactattttttgatactttaccatctcagaattaccatcttagtcaacattttgctgtaacttagcgtcactgtaagagctggtagttaatactacgttggggttagcacaaggcaggagtatggatgggggtggtaggcacttcacaataaaaactggttgcaatgagtatttgtattcgtaacattcgtgagatattttcataaatttgattacacttcacagaagagaaaaggacaagctaatcttatttggatgaagtctatatttaatttgtaatttgtaagtcttgggaagtttgtttcctgaggctactgtaacaaattgccatggactcagtgagttctagacagcataagtcttgacaacatagcctcttacacttctgtaggtttaaattaattaaaatcaagtttaattaggtaacataatttaaattaggttgttcgtgggttcggaatccacctgaagagaaatgtgccgagcaatctgtccatctcttggagccacctgttaagcctgaagtccctcggtttgtagtgatgatagtctgcttttgcctctacattcccgtgttcacatgaccttaattgtctctttgtgtctgtctgtccacatttccctgtgctgatactgacactggccatttgattagcactaatgctaactccgaatgagtgcagcttaattacacctgtgaagattctgtttgcacctgagtgtcctcttcctgggttccagtagatgggaacctgctgggaggaccgcttctacccaatcccacctcttgtcacacacagtgattgtataaaaataagctctcctgtgtccctctactgaacacacacagaggtgagtatgatcagaggaattgcagggacatgtgtgatgagggtcagagtgtctttcctcttccttcatatttctctctctctcaaatatatttttaagagtccctcagtattcatttgcacatctctgtaagactgacagcccggctcccgtacttccttcttttttttttttttttttttgtagtgtgtgtggtatatgtatgtatacatgtgcacatgggtacatgtgtgcatatgtgttctagtatgttttgaggacaaaagtcaacactggctaccttcctcggcttcttgaccccttattttttgaggcagtatttatcactaaacctcaaactcactaatttggccagattggttgaccaacaagctggggaagcacctctgctccacagaaacagaaaccacattctaggaaatcttacccatcatgctcttgaaatcttacccatcatgctttagaaatgccaagggcttaattcccgaggagagagctcaggcttgccttcagtgactcacgtctagtctagtgtgtcattttttttttaagttctaaaacctctcctggattccctctgcatactaatttgcacgcgcccacacaacaataacaaacctaattaatagtaagccctaaataagcagcttcgtgtgcaagtgtgtgtgtgcttgttcgtgtgtgtgtgtgtgtgtgtgtgtgtgtgtgtaggtcagaggtcagtgctttgtttcttagttgctcttcccattcgttttagaggcatggtcttgcattgaacctggacctcaccaattcagctagctgaggtggctagcgagcccctggcctccatatgtccctgccttgccagggcaaggatttcaatgacattgaggctttgtcaagtttttgttttgttttgttttgttttgttttgttttgttttgttttgtttttggtagcctttgagggttagaactcaggtcctcgtgtttcccacaccagcgctttccccattcagccaccccctcatcctcctgcctctgatctgtttgggaagtttaaccttcattgccttcgttcttgaatctggccaattcctcatcagaatctgtggctctcacagaggttaggataatgggttttgaatttatcagggctcctagtacatcaaaagtacagctgggagtttgggacacggctcaattggtagaatgcttgcctaacatgcacaaagccccgagttcgattcccatcaccacatagactgtgtgatgtgacgtgcccataatctcagctaatttgagtggagcacggaggctctagaccagacttggtcagcacagcaggctcaaagccagcctaggacatgtggaaaccctgtctgaaaactgtatgatgggtctgagcgcatcgatttaacaatggagctgtcttctgagaaaggcattctccagtggtcttgacattgtgagaacagcccagaatgctcttctactaaagcagatggtggaggtcgcgtgacacagcctttttgtgcaggcaggcagaatgtgtggtaaacagggggtgcatgggttgcttctcatgtaacacaagttttacagtaccccgtttttaataaatagaaggctgtgctctaaaatagcaatgaaatatgggacagcaagcatataagcccacaacccagtcttttattccattggcaggtattctatgctctgtattatgatatgccccatatttctttatgaccagaaccacaatccagttgtttacatggggttcttcaccctatgacatcacactgcctacagtgtttgctggcagtagaaccgtttcaggaccatggttaggatcattgaggggcattgtcctgctggtgggacaatcacgagacagcgtgatgtaagatttctagcctgttggtgtccttgcatggctcacttccttccgtctttgacacatatcgctgttcagcagattcaacagtatacctcggtaactgtgggagtcaaatgccattttaacctttgcagtctgtaaataaagagttgcaatagcagctaatctagtttggtatgctggcacatggtgccgttaatctgttctttgtgtttgccttctgaatttgttacgtttcataaacagagcgaaggggtttctggacgaggactggttaaggccatttgttttcctatagaaagattccatgcacatcttactttactgagagtttgttcctgctgctggggagagggctcccttggtaaagacttccccctgccatttgaaagagctgcgaaagctggcacaggattgtgaatcccagtcttggggtggggtgggggaggcttgtgggcccctggggctcactggtcaggcaacaaagctccaggtctatccaaaaaacaaaagcaaaaacaaaaacaaaaggaaaaaggaaggcagaaaactgcctaaagaactataagaactattccagagatttccatcaaacctgcatgcatatgcacatgtgtggatgtgaatgcccacaccagcacatacatgcatggcagaatctgttcacgacatgccaaagattctgtaccctataatttctttaaaccttgtttacttgcctgttggagactgggtctcaccatttaccctggggctgtcctagaacttgtgccccttggtctcatgctactgagtgctgagattacagactcaggccagtgttgtgttatttcttttgtagctttatagtcaaagagggggcagggaagggggacactgtgtttctgtgcaacaaagcttatggtctctactttgtatatttcattttctcacactcagctgtaaagatagcagcggggaaatggatacacctatgttttgcctcaggtgggactcttatattcccctggaacttaagtcctctgtgtggaagtagaattttggccatgtcatcgagcaatacatgtctataatacccagttctatctcctcctcctgatgtttgactgagtggtctctttaacgaacaggtgtatttgactgaagtgcacatctgtcatcaggctggctgcccttttgtgatctgctcagtgctggtcactgagtgacgaggactctggttggtgttggtaactggctttctcctcttggggtttctcccccatcctggattggaaggctctgtgacatgaacattttctgccagtctcaacctgcaaagatattaagttgtcttcatgcctctcctttcctcctccaagaagtggaagttagaggggctatagcctactgtaacgtgcatgttgtacaggcacgagtttgcatccacagaacccacttagaaaaccaggtgtagcagaatgattctgaaactgtgtgtgtgtgtgtgtgtgtgtgtgtctgtgcattggagacaggcagatctctcgagtctgccctctgagttcctcatcccatacctacaaccccatctccaagaggatatccctataccccaccctctccccagtccctggggtctcgaggctctcgagggttaggtgcatcttttctgattgctgtttcttaaactcgagtcctgctcagagtaatggtgtgtttgtgcgtatccccttatgcccaccagcatcttttaacattgcacactagatcttcagagagatgccagtaggagggcaggtgataagagctgtgaacttacagtgtagacaggcacagagacaagatttccctatcttgagggagcatcaaattggtcagtggtacaagaaatggtctgtgagtctcttggtacagtaggactctgatgagttactgttggtggggaaggcagaagcattagagaagcaagagagattctgagaaggtttgtgaaaagagacaagggaccagctacccttcaagtgtcttgttaaacatctgactttgctcttttcttccacactgaagggcaatctggagatgtttgatggtcacagtaaggtatcctgggcctttggcatctactgggccaaagatttggcaaaatatcctacagtccatgggacagttgtatagaagggataaactggtccctaaagtcaatagcatctagtttgagatatgtcacctaaggaatggattattttttttgtgacaaggagcaagtgtgactggtgagagggccttggaaatggctgacagacgactggtaccttacagtttacagtctcttcaccatgccaaatgtctgctagtgtaagacccccttttggggatgcccactctatagtctccggagtgagagagcacccaaagaaacacgagagtccatcttgctgtaatcacatgaggcagtttaatgacggagctccagacagacacgcatcccacacaggagataacggatgtcagtcacaaggctcgaaagccaggggtttttatgaggttaggggcctaggggtgtggaattcagcatagcaacacactattggcttattcaaacatcagcagaaaaattacatgtacgtgcagggtgtcagagttctgtgagttgttgactcagttcagatagccctgttatgtcctcacattcctctttatcttatggtcaagcttttcccaggaatgttttaatacggggcatacccgggtttgtttttcttttttttttcttagccccaggcagcctctaggctcacaaacaaccagcaagttctgagtactttatatgacttacaggtcttgaaatttcatcttcctttcactagaggctgaatccttggggagttgtgacttatagtcatgaaaggggtgtatagacagtcacctgagtaggacattgttccttgctgactcctccctccttgagaggtggtgctgctactggaagatagttcggaatttgtctcctgtttccatggcaacagtggagttgcatttagggcatccagctgaaggggtgggtctggttaattgtgtcttccaaggtggctagggtgggcgtgaggctgatggggcagcctttcccaatcctgtcccctgtcagcacattctgcccagatgttaccttgggtgcgttcttggaagtgagctaaagaattaggagaaagaaaatagcagaaatcaatgttcaattatgcatatatatgggataccaggaatatttgtgtgtgtgtgcttatgtgcatatgcatgtgcttatgtgcatacacatgtgtattttattatattcgcctgtgcgtgtcattgtgaaggccagctgtggcattgaatgttagtcttcactgctcaccttattttgtgagagagggctgctcactgaatccagaagtcattttccagggagctcctgggatccacttgttgcagactaaccactgggattacagatgcatgctgtatgcctggatttttacaagggtgtcaggagatttgacctcaggtcttcttcaatattgcactggaagctgtttatacactgagctaccacctcattcccttggtttttccttttggtgttttacagaagaggagataacttgccaatgttttcatggtgccaggtgttaatcagtggaagatatttctaatgcttgtggcttagacattttagacctcaccgtgaaatagccctgacataatcaccttttatgagttgtgtggttcagggtggcgtacctagcattttgtttctccttatcattttttaacttgattgaatgtacctcttggagataaaaattgctttttacagatgtgagtataaaatggaaaagcttatccctgttaagcatatagattttttcattaaatttttgttataaatatttcaccggctaaattcaaatcagtatgatggagttgaaacataataatactattgatttaataaatgctggcattctgatgtcatttcttgatgaaattaatattatgtgagtcgtttgctaacaagaacatgaacattaatccattcttcaaataaaaaaagaaccaccatgagacaagcagctttttaaagaaagtgtaacatatgctgatgtgtgtaaagtttccagagttcattatatagcaatttggactactttgtagtactaactaaaaccttcctttatttttactgaaacctattcttaagaattatgcaaattattggggttttaaagagaaacctatgtatgcaatgtttaatttcccaatagaccaaaaactagcatgttggaactaaaaatatttatctcatgcagtgcagtatttatgtgtgtgtgtgtgtgtgtgtgtgtgtgtgtgtgtgtgtgtgtgtgtgtgtgtgtggagtccttgtaactgggtaacaagtgcttgtcacccctgagccactgttccagtcaccctctgccatacttttgggtaagcacataagtgattaaggatgccctggtatctatgtaaaaccttgctgacttacctgagcactcgctgttgtcaaattcctcaattaccctaaagactttcctctaactccagtgctggggcagggcagggtaagagtaggaacacaggacaaattggtccctaaagcttgttggtctgtcagccatttaattgaattgattagcctcagattcagtaggagaccctctctcaaataataaagttggagagtggttgagggaacacaagcaaatgttgacttctggaatgaacatacagagaggcagagagatgagagagacagagacagagagacagagaagtacagaacacattacccctccaaccccctccctgatctttagaatgtagacttgagagatgatgcaagcacaagtttagatttcttgagaagaaatacctcactacaatatttttgtctctgaggacaggcagccattgattggttctcactagagaactgtgcacgataaagaaccagataagggactagtctacaggccgagttccctggagccacagaactttcaatgtaatatcgggagcattggttgtagtagggtggatgtgaacttagccaaagacatcttctagtcagggatcaacatcaaatgaaagatctggggcagaaagtctttacagttatggaacagctctctttggaaagctggctcgattttcatatttaggagagcaatagatccccgtggtttttgttgttgttgttttactgcatattcatttgatagacttgggaatggcaagctttatttgaacctgttattacttcagggatggactgtaaattcatttatttatccttgactacaaacacccagtgtgaagtacaagatgacctccaattcagcaagatgaattctgatattctgagtccggtcaacctcgtctctagctgtgtggctgaagaagataatgaaatttgttttctggacgaagcagtggagccccagggctccgtaatcaggtttcagggaggggtcagtgcaggcagacaccagttgagtaggagatgcaaagctcatccttactgagcaggagtcaggctccgatgtccccagggcagctgcagcttctcaccagcactagagttatggactcaaccagtgacccacccagctcttagcctgtttggaaggagagtaggtgattcccacggatggatgccgtgtcatgtcatttggtggcaaaaagccctgcttttttctgaaggtaatcctgctgggtttcagatgactcatggccacctttattgtgtggggcttcagcggtgagcacttgacaagatcaaagcaatgtattggcacacggagttgttttgcttcctgtaaacttaagcatggccaatgaaggcatgctgcctctcccttgaaaacgtaatttagcctgcagaaaataattaaatccacactgtcttgcaataattagaaatttgaaatggagagaattaattatttccatcagatttcagtcactcaagacaatgcttaagaacagattccagaccgttggcaagttaattcatggcgctctctctaatacgctcactcttatcccccccacaggaccatgcagacttgcaaagccatttctttacagttgggatgcggctggagacattgcatataagcgatccttttcatatctaccctgcatcagtgaccaaggtaggttttctgttttgctccttgctctttgttttacagtgaatcgagtgagtcttcaaaggtaggtagatgcaatatgtgcctacaaggagcactcacagacacaccccatagacaaaccaaagggagacgattgtcccttcttctcagttctgtgttaacttctttctgtgaaagggggcagaggagtctaagcagattcctcctttctagcatggacagagtgactggcttttcttctcttagtagttgtttattggtgagttgcattttacaagcataatgtacaggaccacagagatggctcagtgagtaagagggatggcagtgcaagtatgagttcaaatccccagctcttgaggttaaaagttgaatggcgcatgccgggaatccgaataccaagaggacaaaaccaggaggattactagggcttgcctagacaaatccaacaaccagccaaccaacctccaagcactgagctccagatccagtgagaaatctgttctaggaaataatattgatcaagacatgtgatatcctcctctggccaatactcatgcatatatgcgcagtgcacaaacaggcaacatgccgcaaacaagagtgataagtgctcctgcttcatgactgtctgtttatatttagaaaattctagaaggcagattcttatttcctcgtaaaccagcgttcttgcttcttcttcttctttttcatctgctttcattggttaaaggaagtcacctgctgccaagattgtcagtaaaaatgaaattccttcaccatgtaaaggtgtttttattcagacctggtatcctttgatattatatgattattgagattgtctcttcttcataagagaaatcccggtggttctaccagtggtcaaattcacattgtgtatttcccactttaaatattagcttttgttaagtggtagaagacactgacaagctgaaaatttttttcttcaaatgtgtcttcagttaatgacgctttttattcagaggaagaatttgattaaagattcaaggtcaattgaagtttaatttctatttccaaaggaaggtggatatatttttgtagtaagtcaaatattattataattnnnnnnnnnnnnnnnnnnnnnnnnnnnnnnnnnnnnnnnnnnnnnnnnnnnnnnnnnnnnnnnnnnnnnnnnnnnnnnnnnnnnnnnnnnnnnnnnnnnnnnnnnnnnnnnnnnnnnnnnnnnnnnnnnnnnnnnnnnnnnnnnnnnnnnnnnnnnnnntttttctaaatgggtgtatggatttgtctagagcactacagggccagcttcccctgaattttaggaaacaagcaggcagacccgctgcacgcagcccacattgggcacattgctcacatttttgtacctttaaattattgtgatattcagcatcaaagagtgacacatttcttattggtagcctcagtttggatagacggtcagcgacaggtttcgtgctcacagtcatttccccttacgtcgtcttgctgggagacagaatcgtctgcaggtgttctgaaactgcgttctgcacactgttttcctctgcacttgtattcgagaggaagtatgtaatgccactctgcctcattggtatcccattctctgattgtccgtttgttgctttaatgaacgaattggaatgtgtggtcttgtttctaagaacctcctcagataaattcagggcacatcatcatgtatgattcaccagaatattcttcatgtagaagatatttataaatatatattggatatatcttcactagaggggatacctggagtgggtatgatcccagttcatcgcatacatgtctgagatttaaaaatacttgaaatgcatttatgttttaggatattttgctcgagaatatcacacactgtgctttaattgatttttatagtgtaagtttcacacaggcacccctttaaggtttttttttttcctgaaagcccggaaaaagatagaataaattatattaaagcatacagctcagtgcagaggtgccctagtgttaaatggagaggctttagtagtggagcagggctggttctcgtattccaaacatttggtgaggtgtttgcagccctggagcatgtgaagtaggttgcattgaagaaaggccagggcatgagagacccgtgaaccccatgccagagggaacacagagcagagctttgcatccctgggaacatgagtcctgagagatgggagggaacttccgggacttttctctggagtcttctcacatcaatgtgaagtttgatagatcctggaaatctttaggcaggtcccacggtgcttagataccctgccgccaggacagcttactgtgtgtgaggacccgtatgtatgtgtggtcggaccgattgcagtaaccttccagagagctactgagtagtcataggtgttgctctggacattgaggcatagaccaattaattccttgttgttatcaggtatacattatactccagggaatcagataacaaagaaaatgaatgcgtaaataaatagatcccagagaggggttcatgagagctgtgactggcgggaggatgcgattttactcttttgatttttgttttatgtgtatgggtgtttttacctgcatgttatgtctgtgcactgtatacatggctagtgcttgctgaacgaagccagaagagggcaccagatcccttgggaatagagttacaaacaggtgtcagctgccatgtgggggctcagaattgaacttgggtcctctggaagaacaaccggtgctcttaagcagagggccatctgtgcagtcctgagagtgtttataaatgaaaccactaccaggaaatgttttcttaggcaagctggccatgatccatcccccttatttaaaaaacaaaaacaaaaaccaaaacctgtttttaaatagggtctcatgtgacccaggctgtccttaaacctctgatcctcatgcctccatattcagggttagcattgcaggtttgtgtcaccatgctaggtttgagtctatgcttctcagagtagatgtttcaaaggcaactgcccagtgactacagttaaagatagttactggaatcagaacatagaggtgagggttagacttcgtactcttggcttatagatttagtttacaacatactttgtaatggagggagctaggaagcagagcttagtataaatgtaaaggaagtgtgtgtgtgtgtgtgtgtgtgtgcgcgcgcacgtgaacttatagggggaggggggaagcatctgattttgctacctgcttagagctttgtttctttctttctctctctctttttttcctttgcaatattggagcttaaatctaaaacctggcacatgctaataagcaagtgctctactagtgagctgtattcggagtccttcttaggtttatttattttattttactttgagccagagtctcactagtttgcctcggctggtctttagctcactctgtagcccagacagttggcaagcttttgaacatgcgcccccccatccccatccgcatcccccgcccagactcagtctccatagctgggctgacagagttccaccaactagacctgcttgttcatttttgtctcattcgctgtccattcatctacaaaccattttctatgcctctgaaaatcatttgatgaagaaaggaggttgctgtcctcaaagaatctctgatattttggtggtgacaggtgatggaggggaacatgaagtaaagacaggtttttctgcataggcgatttcgtctctgactacaggatgttatattttgaaggatgcaatgcacaggggtctagaagtctgccagagctgaagccagagggtttgaaggatctgctgtgagcagtttggtccctgctgtagaggccaaagtgccattttggcttttaaatccctagtttatttttccatggataggaactggttgtctgtctgtccgtctgtcagtttgcttttcttcatgtaaggcccttgttttatatttttaggtctttattttttggttttcatcttctcccttctgtgtatttcctttactcctctctccatgtatgtggccaccacgactgagtctgctttcttatccactgggctcagtgattggtactgaaatgctggtttgtgctatagtcaattcgataggatatgttcagtgtcattgaaacaatgtcaggatttgtatgtgtaacactgagaaattaacatttctgttttcttttctttgtcccttttctttttttctaggtttttaatagtaaatttttccaagtggccattgatgacctaagacctgaagctgataaacccacgatgctgtgccatgcagattctttggggattttgccagtacagtggtgccttaaaaacggagtcaacctcgctcctcccaaaggtttgtaatctgtgaaaatatgtggggttggagtagtccaggctggtgtcttcttgtctctgacacgacgtcatcatgtttacctggacaagttgcagtgtgaattgacctgccatgcagggcaaggattcttctgtattgattgatggatgtcactattgctccccaccttggaaggtctgttgggcttgattttcagggtcaagggcaaggcacttcctccactagatggggcatgtgtcactgcttctctctgatgctctgtagtgagtgatccaggcaccacaatgctgccaccgagcgatggaagttaaaaatatgaaaaggcctgagaagtgtgtacaacaaaatggcaatggtgtatttttttggacttcagtgtctcagatactctacgggtcagatactcttagggtccaaaattttaacataataattatgatacttcacttaatgctatcatgtccaagctttgctcagtggggacaacattacatgaaaaattaagccctacatggtggtgtgctctgacagtagaggcaggaaaactagggatacaagatgatcctcagtgagtataaggctagcctgggctacatgaaaccttcactcagaaaataagtaaactaaacactaaacgaaacgaaaagatattagagaatgtgtgtgtgtgtgtgtgtgtgtgtgtgtgtgtgtgtgtgtgtctgtgtctgtgtgtgtgtgtgtgtgtgtctgtgtgtctgtgtctgtgtgtgtgtgtgtgtgtgcgtgtgtgtgtgtgtgtgtgcgtgtgtgtgtattccatacatattatatatatatatatggaatggcaggagagaaattggagaaagattagaaaaataaacttaatgggacagattgctacatactaccgtaaatacaaagaggttttgcatgagtccttttcagatgtgtagggactatgggataacctaagatgttacatttgctggctggctgtcaggagctgttgcaccgttgacctgtgctgtgtgtagcttatcttcagcatcgttgcccttgctgggctctgaccctcatttctcttccatcctcctgtctatggcggaggtgatcctgcacctctccatttcagcaattgactcttcagattagagatgtgtagttctgtgggctgatgacttggcagcgaaccatctttgaggtttctgatcactgtgtcctcacaaatcatggcatgaggactcttcattgcagacagttcatataatctgccatgcccagagaaacaaggatttgagtgacagacaggagctgtggccaccgtgcctactacacctggtgatggtggaaaggctccggccagtgagccctctgtgtatttatgtttgggttcttgttgttgtgacctgaactaaatgtaaagcttacatttcaaagctttcactggggacttcatggtagtctctaggtagcacccagaaacaaatgaacagggttcaatatgttagagaaacaaatagtgtttgctgcaccagtagcaagtacagctactgtgcacttaggcaggcccagcagtgtggaatgcagagcaatgttccaagtactccgcagatgtagaggacgcaggcggatgtgttaatcattctgtttagatcccaggtccgactacatgagggattttagcactcaagtaggttttctcatctggaatgggttgtaaaaactatctcttttaaaccccagttatttttttcaccctggggaactccaagctcagttgtgttaagtaatttatgaaatcccgagaggttgtctgaattccagccttacactcccaaatgaatgcttctctgagtaggtgtactaactatagctaccctttgctgctgttcctagggctggcatctcacgaaggccatccttcagggcagttcgagcaggcagatgttagtgggccgtgcctttcacttgggtaattggtctatatgcttgagagcagttggtgaactacagtctgaaggtgtcattttcgaaatgttggtggttataccacagtcgtggctttgcttattggactctggtttcatctcctgagagtagattatatttatgttggtaattaaaatgaatgcaaattgagacgtcttgatactggtgggatttgtaatgcggcttagtggcttccttttgaggttgttcatctcatgtcgtatcttactatgagggctgggaaccctggtgcaggattttgcaaacaccattccatattttattaatgtgtgaaaggagacagttttttaaatgtctgttttaatattgaacattggggttgctgggtataatgtgtaagctgcaatctgcatattcccgagagatttcaaaggttttcctgtgtgcttagatttctgtgaaaactgtgaatccttctggcaattggatgttgcttggtcttctaaagtctttcagtagaaagaaacatgggagagagacgtgccaagaacacagatctcttcttatgttgttttgactctgctctcttttaaaagagaaagcaagtatgtatatctgacctcgactttagagacaaaccttctaagctgggaaagacaggaactttccagtggctctctgcctcagggttttgctattagagatttgatcctgccattttaaaccaataaaggacagtcaatgctataggtcctaccaacagtgcttaaataaatacataaataagtaagctaaaaatgatggatacataagctatccgacttctggtcatgtaataccaaagattagtagtagacttcaaagagtcagacttccaaattgagggaatgtttggtggaaaacattggatctgtgctgtgaaatgcaggagccagagtgaaggaaactgcttattgtagctctggcttgtctctagggccaatttgtatgttaatggtcataccatttaggaaggacaggtgtatttaaattactgccgtggcacaaaatgatgcccctcaattctaattctcttttaaaaagaacctgagcagttgcccttagttcattgcaaaaactctactttattgaccatttgttgtattagagagaataatatattaacattcctcaaggcatggtggcatacaacagtaatcccaaaacttgggagtcagagtcagtaggatcacaagttcaaatccatgcttaacttcatgatgacttagagatcagcccgggattcatgtgatgacccctatgtatgtgcatgtgtgtatacttgtgtgcgcatgtatgtatatgaatatatatacacatacacacacttacacaggcaatcacacccacatacacaaacacacacacacacacacacacaagcatacacacacatacacaggcaatcacacacagaaacacacacagacacacacacacacaaacacagggaatgttactcattgatccatttgaatgataagtgacttagagttttagagatgctgcagtcctgggtcagtgagtgatttcagtcacnnnnnnnnnnnnnnnnnnnntgctcaccgctgaagccccacacaataaaggtggccatgagtcatctgaaacccagcaggattaccttcagaaaaaagcagggctttttgccaccaaatgacatgacacggcatccatccgtgggaatcacctactctccttccaaacaggctaagagctgggtgggtcactggttgagtccataactctagtgctggtgagaagctgcagctgccctggggacatcggagcctgactcctgctcagtaaggatgagctttgcatctcctactcaactggtgtctgcctgcactgacccctccctgaaacctgattacggagccctggggctccactgcttcgtccagaaaacaaatttcattatcttcttcagccacacagctagagacgaggttgaccggactcagaatatcagacaacacacacacacacacacacatgaatgttactcattgatccatttgaatgataagtgacttagagttttagagatgctgcagtactgggccaccaaggatatgcatgtgtgtatagttgtgtgcatattcatttttctatatgaatatgcatatacacgcatgcacacacactcacaggaatggccagagctatgtctcaggtaggaggtgaatattcttgccagtgtcaggaggctacagagttcaaattcatgcttaacttcatgaagagttagagatcagcatgagattcatgtgatgcccaccaagaaagtgcatgtgtgcatagttgtgtgcatattcacttctctatgtgaatatgcatatgcacgcatgcacacacgaatggcactcatatatccttttgaatgatatgtgactcagagctttagagcttatgcagtaccaggtcagagctatgtctcagttaggaggtgaaatcccttgccagagtcaggaggtcctggagttcaaattcatgtttaacttcatgatgagttagagatcagcatgcgattcatgtgatgcccaccaaaaatgtgcatgtgtgtatagttgtgtgcatattcatttctctatatgaatatgcatatacacacatgtacacacatgtacacacccacacccacccacccacacacaccacttagagtaatggcatcatatatccttttgaataatatgtgactcagagctttagagcttatgcagtactgggccagtgtgttgtttcactcgttagctgaatacttttgccacagtcagtatgtttcagagttcaaattcatggttaaattcatgatgagttagagatcagcctgggattcatgtcatgccccccatgtatgtgcatgtgtttatacttgtgtgtgcatgtacatgtgtgcatatcaatatatgtacacatacacatacagacgcacacacatacatgcaggaatgtcacttgtcaatccatttgaatgatatgtgacgtagagctttggagattatgtagtattgagtgagggtgaggcttcaaataccaggctaaaatccttgccagagtcaggaggatcaggagttgaaattcatgcttaacttcatcaagagttagggatcagcctgtatcatgtgatgcagcttatgtatatacgtgtgtgttcatgtgcatgtgtgtataatataaatataaatatacatacacactaacatagacatgcacgcgtggaaaaacacacatgaatggcacttatcaatccatttgtatgatatgtaaattagatctttcaatactatgtaatactgggccagtgagacatctcactcactaagtaaaaacgcttgccagagtcaggagaataaagagttcaaattcataattaacttcatgaagatttagaaatcatcctgggatttatgtgatggcccctatgtatgtgcctgtgtgtgttcttgtgtgtgcatgtgcatgtgtgtatatgaatatacatatacatacacacatacacacgcacgtacacacacacaaacacacacatacaggaatggcacttatcaatccatttgaatggtatgtgacttagagttttagagattatgcaataggggacagtgaatgttctcactcaccaggtgtaaacgattgacagagtcaggaggatcagaagttcaaattcatgcttaccttcagttagagatcatcctggtattcatatgtatgtgcatgtgtgtttacgtgtgtgtgcatgtgcatgtgtgtatatgaatatacatacacatacacacacacatacacacacatgcaacacacacatnnnnnnnnnnnnnnnnnnnnnnnnnnnnnnnnnnnnnnnnnnnnnnnnnnnnnnnnnnnnnnnnnnnnnnnnnnnnnnnnnnnnnnnnnnnnnnnnnnnnnnnnnnnnnnnnnnnnnnnnnnnnnnnnnnnnnnnnnnnnnnnnnnnnnnnnnnnnnnnnnnnnnnnnnnnnnnnnnnnnnnnnnnnnnnnnnnnnnnnnnnnnnnnnnnnnnnnnnnnnnnnnnnnnnnnnnnnnnnnnnnnnnnnnnnnnnnnnnnnnnnnnnnnnnnnnnnnnnnnnnnnnnnnnnnnnnnnnnnnnnnnnnnnnnnnnnnnnnnnnnnnnnnnnnnnnnnnnnnnnnnnnnnnnnnnnnnnnnnnnnnnnnnnnnnnnnnnnnnnnnnnnnnnnnnnnnnnnnnnnnnnnnnnnnnnnnnnnnnnnnnnnnnnnnnnnnnnnnnnnnnnnnnnnnnnnnnnnnnnnnnnnnnnnnnnnnnnnnnnnnnnnnnnnnnnnnnnnnnnnnnnnnnnnnnnnnnnnnnnnnnnnnnnnnnnnnnnnnnnnnnnnnnnnnnnnnnnnnnnnnnnnnnnnnnnnnnnnnnnnnnnnnnnnnnnnnnnnnnnnnnnnnnnnnnnnnnnnnnnnnnnnnnnnnnnnnnnnnnnnnnnnnnnnnnnnnnnnnnnnnnnnnnnnnnnnnnnnnnnnnnnnnnnnnnnnnnnnnnnnnnnnnnnnnnnnnnnnnnnnnnnnnnnnnnnnnnnnnnnnnnnnnnnnnnnnnnnnnnnnnnnnnnnnnnnnnnnnnnnnnnnnnnnnnnnnnnnnnnnnnnnnnnnnnnnnnnnnnnnnnnnnnnnnnnnnnnnnnnnnnnnnnnnnnnnnnnnnnnnnnnnnnnnnnnnnnnnnnnnnnnnnnnnnnnnnnnnnnnnnnnnnnnnnnnnnnnnnnnnnnnnnnnnnnnnnnnnnnnnnnnnnnnnnnnnnnnnnnnnnnnnnnnnnnnnnnnnnnnnnnnnnnnnnnnnnnnnnnnnnnnnnnnnnnnnnnnnnnnnnnnnnnnnnnnnnnnnnnnnnnnnnnnnnnnnnnnnnnnnnnnnnnnnnnnnnnnnnnnnnnnnnnnnnnnnnnnnnnnnnnnnnnnnnnnnnnnnnnnnnnnnnnnnnnnnnnnnnnnnnnnnnnnnnnnnnnnnnnnnnnnnnnnnnnnnnnnnnnnnnnnnnnnnnnnnnnnnnnnnnnnnnnnnnnnnnnnnnnnnnnnnnnnnnnnnnnnnnnnnnnnnnnnnnnnnnnnnnnnnnnnnnnnnnnnnnnnnnnnnnnnnnnnnnnnnnnnnnnnnnnnnnnnnnnnnnnnnnnnnnnnnnnnnnnnnnnnnnnnnnnnnnnnnnnnnnnnnnnnnnnnnnnnnnnnnnnnnnnnnnnnnnnnnnnnnnnnnnnnnnnnnnnnnnnnnnnnnnnnnnnnnnnnnnnnnnnnnnnnnnnnnnnnnnnnnnnnnnnnnnnnnnnnnnnnnnnnnnnnnnnnnnnnnnnnnnnnnnnnnnnnnnnnnnnnnnnnnnnnnnnnnnnnnnnnnnnnnnnnnnnnnnnnnnnnnnnnnnnnnnnnnnnnnnnnnnnnnnnnnnnnnnnnnnnnnnnnnnnnnnnnnnnnnnnnnnnnnnnnnnnnnnnnnnnnnnnnnnnnnnnnnnnnnnnnnnnnnnnnnnnnnnnnnnnnnnnnnnnnnnnnnnnnnnnnnnnnnnnnnnnnnnnnnnnnnnnnnnnnnnnnnnnnnnnnnnnnnnnnnnnnnnnnnnnnnnnnnnnnnnnnnnnnnnnnnnnnnnnnnnnnnnnnnnnnnnnnnnnnnnnnnnnnnnnnnnnnnnnnnnnnnnnnnnnnnnnnnnnnnnnnnnnnnnnnnnnnnnnnnnnnnnnnnnnnnnnnnnnnnnnnnnnnnnnnnnnnnnnnnnnnnnnnnnnnnnnnnnnnnnnnnnnnnnnnnnnnnnnnnnnnnnnnnnnnnnnnnnnnnnnnnnnnnnnnnnnnnnnnnnnnnnnnnnnnnnnnnnnnnnnnnnnnnnnnnnnnnnnnnnnnnnnnnnnnnnnnnnnnnnnnnnnnnnnnnnnnnnnnnnnnnnnnnnnnnnnnnnnnnnnnnnnnnnnnnnnnnnnnnnnnnnnnnnnnnnnnnnnnnnnnnnnnnnnnnnnnnnnnnnnnnnnnnnnnnnnnnnnnnnnnnnnnnnnnnnnnnnnnnnnnnnnnnnnnnnnnnnnnnnnnnnnnnnnnnnnnnnnnnnnnnnnnnnnnnnnnnnnnnnnnnnnnnnnnnnnnnnnnnnnnnnnnnnnnnnnnnnnnnnnnnnnnnnnnnnnnnnnnnnnnnnnnnnnnnnnnnnnnnnnnnnnnnnnnnnnnnnnnnnnnnnnnnnnnnnnnnnnnnnnnnnnnnnnnnnnnnnnnnnnnnactttgcccctttttagaaatggatacaaaacacccatggaaggagttacagagacacagtttggagttgagaggaaaggatggaccatctagagactgccatatctggggatccatcccgtaatcagactccaaatgctgacaccattgcatacactagaaagattttgctgaaaggaccctgatatagctgtctcttgtgagactatgctggggcctagcaaacacagaattggatactcacagttaactattggttggatcacagggcccccaatggaggagctagagaaagtacccaaggagctaaagggatctgcaaccctataggtggaacaacaatatgaactagccagtacctcctggagctcttgtctctagctgcatatggatcagaagatggcctagtcgaccatcagtggaaagagagcgccattggtcgtgcaaactttatatgcctcagtataggggaacgccagttccaagaagtgggagtgggtgggtaggggagttggggggggaagggtatgggggacttttgggataacactggaaatgtaaatgaagaaaatacctaataataaaagagttcaattttatccttaacttcacgatgagttagagaggagcctgagatttttgtgatgatcccgtgatgtatgtgtgtatattaatatacatatacataaactcatacatacacatacatgtgacacccacatatgaatggcactcatcgatccattggaattatttgtgacttagagctttagagattatgtagtacttggccactgaaagttttgattcaccaggtaaaaacccttgccagagtcatcagtatctggagttcaaattcatgtttaacttcatgaagaatttgggatcagcctggattcatgtgatgtctccccttgaatgtgcatatgtgtatacataagtgtgttcatgtgtatatgtgtatatgaatatacatatacatacacacaaacatacatgcatgcatggacacacacacacatgaatggcactcattgatccatttgtatgatatataatttagagctttaaatattatgtagtactgggtcagtaatagtctcactcataaggtaaaaacacttgccagagtcaggtgaagagagagttcaaatacaaaatttacttcatgaagagatagaaatcagactgggatgtttcttatgtatgtgcatgtgtgcatatatgtatgtgtgcatgttaatatatgcatataaatatacacatataaactaaccaacacaacatgcacacacacagagacacacacaaatacacacacacacacacaaactcaaaattgatactcatctatccatttgaatgatatgtaacttaatgttttagagctatgtataaatgggtcaaggagaagtctcactcactaggtgaaacacttgccagagtcaggaggatcaggagttcaaattcatgcttaatttcacaacgatttagagatcagtatgcaattgatgtgatgcacaccaagaatgtgcatgtgttagagttgtgtgcatattcacttctctatatgaatatgcatatacacacatgcacacacagtaatgccactcatatatcctttgaaatgatatgtgccatagagctttagcgcttatgcggtagtgatccagagctatgtctcagttaggaggtgaaacgcttgccagagtctggaggatctggagttcaaattcatgtttaacttcatgatgagttagagttcatcatgcgattcatgtgatgcccaacaagaatgtgcatgtgtgtatagctgtgtgcatattcacttctctatatgaatatgcacatacacgcaagcacacacaggaatggcactcatatatccttttgaatggtatgtgacttagaactttagagcttatgcagtactgatcaagagctatgtctcagttaggaggttaagtactcttgccagagtcaggaggatgaggagttcaaattcatattaaattcatgatgaggtagcaatcagtctgggattcatgtgatgtcccccgtttatgtgcatgtgtgcagaagtgtatgcatgtacatgtgtttatgtgaatatacatatacatacacacatatacacacacatgcaaacatacatgtaggaatggtactcatcgatgcattttaatgatatgtgacttagacctttggagattatgtatgacagggccagtgtcaattctcacacacctggtgaaaacccttgttagagtcaggaggtataggagttgaaaatcatgcttaacttcatgaggagtaagagatcatcctggattcatgtgatgccccctatatatgtgcatgtgtgtatacttgtgtgtgcatgtatatgtgtctatatgaatatacatatacatacacacccatatacacacgcatgcacggaaacacaaaaacataaacataaacacaggaatggcactcattgatccatttgaatgatatgtgacttagagtcttatagattatgcagtagtgtgtcaatgaacggtctcactcaccaggtgaaagttgttgacagagtcaggaggatcaggagttcatattcatgctcaatttcagttagtgatcatccagacattcatgttatgcccctcatgtatgtgcatgtgtgtttacgtgtgtgtgcatgtgcatgtgtgtatatgaatatatgtatacatacacacacacatacacacgcacgcaacacacacacacacacacacacacgacactcatttattcatttgaatgatatgtgacttagagttttagagattatgtagtactgggccagtgagtgctctcactcacaaggtggaaatcttgccagagtcaggaggatcaggagtcgaaattcattctcaacttcatgttgagtccgggatcagcttctgattcatgtgatgcccccagtgtatgtgcctgtgtgtatatgtatgtgtgcatgtgcatgtgtgtatatgagtatacatatacatacgcacatacccatacaagcatgcacacaaacccaaaactgccactcatcgatctatttgaatgatatgtgtcttagagtcttagagattctgtatgactgggccagggagaggattcactcaccaagtaaagacccttgccagagtcaagataatcaggagttcaaggtcatggtaaaggcatgatgagttagaggtcatcctggcattcatgtgattgcccctatgtatgtgtgtatgtgttgatgtgtgtgtacatgtacatgtgtgaatatgatatacatacatgcacacataagacacatatgagcacatagacacacaggaatggcactcactcatcaatctatgtgactgagagctttggagattatgtgtgactaggtcagggagagttatcacccatcatattaaaaatgcttgttagaatcaggaggtcaggaggtcaaattcatgctttatttcatgatgacttagaaatctgcctgggattcatgtgatgcccccatgtatgtgtacatgcgtgtacctgtgtgtggattgtgtatatgaatatacatatctacacacgcatagacatgtacacagacacacaaacatgaatgcaactcatcgatccatttgaatgacgtgtgactaagagttttaagattctgcagtactgaatagggagaggtctcactcagcaggtgaaatcccttgccagagtcaggtggtcctggagtacaaattcatgtttaacttcatgatgagttagagttcagcatgcgactcatgtgatgtccatcaagaatgtgcatgtgtgtatagttgtgtgcatattcacttctctatatgaatatgcatatacacgcatgcacgcacaggaatgccactcatatatccttttgaatggtatgtgacttagagctttagagcttatgcagtactgggccagagctatggctcagttaggaggtgagtactcttgccagagtcaggaggatgaggagttcaaaatcatatttaattcatgatgagtagagatcagcatgcgattcatgtgatgccctccaagaatgtgcatgtgtgtatagctgtgtgcatattcacttctctacatgaatatgcacatagctgtatgcacacatactcacaggaatggccagaactatgtctcagttaggaggtgaatattgttgccagagggaggagaatatggagttcaaattcatgtttaacttcatgatgagttagagaacagcctggaatttctgtgattgtccccgtgtatgtgtatatgtgtataggtacgtgtgcatgtaaatgtgggtatatgaacatgcatatatatatatatatatatatgtgtatatatatatatatatatacatacatacatacacatatacacacacatatggacacatacatgtgcacacaaacacacatggtagtcatccatttgatttatgcatgcttagagtttcattgagtgtatattcatgggatagcaaaacatctcacttaccagatgaaaactgcttgccagagttaggagtctcaggagtgcaaattcatgcttaacttcatgagcagttagagatcatcctggaataatgtgatggcccctatgcatgtgcctttgtgcataagtgcgtgcatgtatatgtgtgtatattttatgcatatacatacacacacctatacacacatgcacacagacatgcgagaatggccctcacggatccatttgaatgatatgtgacctactgctttggaggttatgtatgactgggccagggtgaggtctcacaaaccacgggaaaacccttggtagagtcgggaagatcaggagtgcaagttcatggtaaaggcatgatgagttagaggtcatcctggcattcatgtgattgcccctatgaatgtgtgtatgtgttgatgtgtgtgtacatgtacatgtgtgaatatgatatacatatacatacacgcacacataagacacatatgagcacacagacacatgggaatggcactcatcaatccatttgagtgataagtgacttagagtgaaaatgcttgctagagttaagagtatcaggagttcaaattcatacttatcctcatgagagatcagcctgtgattcctccatgtatgtgcatgtgtgtatagttgtgtgtgcatgttcatgtctatatttgaatatacataacatacacacacatgtataaacgcaagcacacatacacagacacaggaatggcattcgccaatccctttgaatgataagtgatgtagagttttagagattatgcaataggggacattgaatggactcactcaccaggtgtaaaagattgacaaagtcaggaggataaggattgcaacttcatgcttaacttcatttggagattatcttggtattcatgtgatgccacccatgtatgtgcatgtgtgcttacttgtatgtgcattgcatgtgttgacatgaatatacataacaaaaacacacgtgtatatgcaagcacatacacacaggaaaaattgcattcatttatacatttgaatgatatgtgacttaaagttttcaagattatgcagtagtgggacagtgaatggttttactcaccaggtgtgaaagactgtggatcaggagttcaaattcatgctttacttcatgatgacttagagatatgcctgggattcatgtgatgccccctatgtatccctatctgtatctgtttctattgtgtgtggatttgagtatatggctgtacctatctacacaaatatatacatgtacacagacacaaacagaaacacacacacaaacatcagtgcaactcatcgatccatttgaatgacgtgtgacttagagttttaagattcctcagtactgaatggggagaggtctcactcagcaggagaaatcccttgacagagtcagttggatcaggagttcaaatttgtgctgaatttcatgatgagttcatgaccagcatgggattcatcttatgcccaccaaaaatgtgcatgtgtgtatagttgtgtgcatattcacttctctatatgaatatgcatatacacacatgcacacacattcataggaatggccagagctatgtctcagttaggaggtgagcactcttgccagtgtcaggatgaggagttcaaatttatgtttaacttcatgatgagttagagttcagcatgcgattcatgtgatgcccaccaagaatgtgcatgtgtgtatagttgagtacatattcacttctgtacatgaatatgcatatactcacatgcaaacatactcccacgaatggcccgtgctatgacttagttaggaggtgaatactcttgccagcatcatgaggatgagcaattcaaattcatgtttaactttatgatgagttagagatcagcccggaattcatgtgattttccctgtgtttgtgtttatgtgtataggtgaagtatgcgtgtacatgcgcgtatatgaacatgcttatatatatatatatatgtatatatatatatatatatatatatacaccacaccaacacacaactagggaaacattcatgtgcacacaaacacacatggcagtcatccatttgatttatacgtgcttagagtttcattgagtgtatattcatggtatagggaataatgtcacttatcagatgaaaaccacttgccagagttaggagtctcaggagttcaaattcatgcttaacttcataatgagttagagatcaccctgtatttgtgtgatggaccctaggtatgcacaagtgcatataatttgtgtgtgcacgtacatgtgtatatatgatcatacatataaatacacacacatacaaatgtattcacacacacaggcatgcacactcacacacataagaatgacactcattgatccatttgaatgatatatgtcttaaaattttgctgattataaagtagagggacagtgaatattctcactcaccaggtgtaaacaattgtcagtgtcaggaggatcaggagttcaatttcatgcttaacttcatgagcagttagagatcatcctggaataatgtgatggcccctatgtacgtgcctgtgtgcgtaagtgcctgcatgtatatgcgtgtatattttatgcatatacatacacacacctacacacacatgcacacagacatgcgggaatagccctcacggtccatttgaatgatatgtgacctactgctttggaggttatgtatgactgggccagggtgaggtctcacaaaccacaggaaacccttggtagagtcgggaagatcaggagtgcaagttcgtggtaaaggcatgatgagttagaggtcatcctggcattcatgtgattgcccctatgtatgtgtgtatgtgttgatgtgtgtgtacatgtacatatgtgaatatgatatacatatacatacacgcacacataagacacatatgagcacacagacacatgggaatggcactcatcaatccatttgagtgataagtgacttagagtgaaaatgcttgctagagttaagagtatcaggagttcaaattcatacttatcctcatgagagatcagcttgtgattcctccatgtatgtgcatgtgtgtatagttgtgtgtgcatgttcatgtctatatttgaatatacataacatacacacacacgtataaacgcaagcacacatacacagacacaggaatggcattcgccaatccctttgaatgataagtgatgtagagttttagagattatgcaatagggggcattgaatggcctcactcaccaggtgtaaaagattgacaaagtcaggaggataaggattgcaaattcatgcttaacttcatttggagatcatcttggtattaatgtcatgcaacccatgtatgtgcatgtgtgcttacttgtatgtgcattgtatgtgttgacatgatatacataacataaacacacgtgtatatgcaagcacacacacacaggaaaaaattgcattcatttatacgtttgaatgatatgtgacttaaagttttcaagattatgcagtagtgggacagtgaatggttttactcaccaggtgtgaaagattgtggatcaggagttctaattcatgctttacttcatgatgacttagagatatgcctgggattcatgtgatgccccctatgtatccctatctgtatctgtttctattgtgtgtggatttgagtatatggatgtacctatctacacaaatatatacatgtacacagacacaaacagaaacacacacacaaacatcagtgcaactcatcgatccatttgaatgacgtgtgacttagagttttaagattcctcagtactgaatggggagaggtctcactcagcaggtgaaatcccttgacagagtcagttggatcaggagttcaaattcgtgctgaatttcatgatgagttcatgaccagcatgggattcatcttatgcccaccaaaaatgtgcatgtgtgtatagttgtgtgcatattcacttctctatatgaatatgcatatacacacatgcacacacattcataggaatggccagagctatgtctcagttaggaggtgagcactcttgccagtgtcaggaggatgaggagttcaaaatcatgtttaacttcatgatgagttagagttcagcatgcgattcatgtgatgtccaccaagaatgtgcatgtgtgtatagttgtgtacatattcacttttgtatatgaatatgcatatactcacatgcaaacatactcccacgaatggcccgagctatgactcagttaggaggtgaatactcttgccagcatcatgaggatgagcagttcaaattcatgtttaactttttgatgagttagagatcagcccggaattcatgtgattttccctgtgtttgtgtttatgtgtatagggaagtatgcctgtacatgcacgtatatgaacatgcatatatatatatatatatatatatatatatatatatatatatatatatatatatatacacccacacaactagggacacattcatgtgcacacaaacacacatggcagtcatccatttgatttatacgtgcttataatttcattgagtgtatattcatggtatagggaataatctcacttatcagatgaaaaccacttgccagagttaggagtctcaggagttcaaattcatgcttaacttcataatgagttagagatcaccctgtatttgtgtgatggatcctaggtatgcacaagtgcatataattgtgtgtgcacgtacatgtgtgtatatgatcatacatataaatacacacacatacaaatgtattcacacacacaggcgtgcacactcacacacataagaatgacactcattgatccatttgaatgatatatgtcttagaattttgctgattataaagtagagggacagtgaaggtctcactcaccaggtgtaaataattggcagtgtcaggaggatcaggagttcaatttcatgcttaacttcatgagcagttagagatcatcctggaataatgtgatggcccctatgtatgtgcccgtgtgcgtaagtgcctgcatgtatatgcgtgtatattttatgcatatacatacacacacctacacacacatgcacacagacatgcggaaatggccctcacggatccatttgaatgatatgtgacctactgctttggaggttatgtatgactgggccagggtgaggtctcacaaaccacgggaaaacccttggtagagtcgggaagatcaggagtgcaagttcatggtaaaggcatgatgagttagaggtcatcctggcattcatgtgattgcccctatgtatgtgtgtatgtgttgatgtgtgtgtacatgtacatatgtgaatatgatatacatatacatacacgcacacataagacacatatgagcacacagacacatgggaatggcactcatcaatccatttgagtgataagtgacttagagtgaaaatgcttgctagagttaagggtatcaggagttcaaattcatacttatcctcatgagagatcagcctgtgattcctccatgtatgtgcatgtgtgtatagttgtgtgtgcatgttcatgtctatatttgaatatacataacatacacacacacgtataaacgcaagcacacatacacagacacaggaatggcattcgccaatccctttgaatgataagtgatgtagagttttagcgattatgcaataggggacattgaatggtctcacccaccaggtgtaaaagattgacaaagtcaggaggataaggattgcaaattcatgcttaattcagttagagatcatcctggtattcatgtgaggccacccatgtatgtgcatgtgtgtttacttgtatatgcattgcctctgttgacatgatatacaaaatataaacacacgtgtatatgcaagtacagacacagagaaaaaaattgcattcatttatacgtttgaatgatatgtgacttaaagttttagattatgcagtttgggacagtgaatggttttactcaccaggtgtgaaagattgtggatcaggagttcaaattcatgctttacttcatgatgactttaagatatgcctgggattcatgtgatgcccctatgtatccctatctgtatctgtttctattgtgtgtggatttgagtatatggatgtacctatctacacaaatatatacatgtacacagacacaaacagaaacacacacacaaacatcagtgcaactcatcgatccatttgaatgacgtgtgacttagagttttaagattcctcagtactgaatggggagaggtctcactcagcaggtgaaatcccttgacagagtcaggtggatcaggagttcaaatttgtgctgaatttcatgatgagttcatgaccagcatgggattcatcttatgcccaccaaaaatttgcatgtgtgtatagttgtgtgcatattcacttctctatatgaatatgcatatacacacatgcacacacattcataggaatggccagagctatgtctcagttaggaggtgagtactcttgccagtgtcaggaggatgaggaattcaaatttatgtttaacttcatgatgagttagagttcagtatgcgattcatgtgatgcccaccaagaatgtgcatgtgtgtatagttgtgtatatattcacttctgtatatgaatatgcatatactcacatgcaaacatattcccacgaatggcccgagctatgactcagttaggaggtgaatactcttgccagcatcatgaggatgagtagttcaaattcatgtttaactttatgatgagttagagatcagcccggaattcatgtgattttccctgtgtttgtgtttatgtgtatagggaagtatgcctgtacatgcgcgtatatgaacatgcatatatatatatgtatatatatgtatatatgtatacacacacacacacacaactagggacacatacatgtgcacacaaacacacatggcagtcatccatttgatttatgcgtgctttgagtttcattgagtgtatattcatggtatagggaaaaatctcacttatcaaatgaaaaccacttgccagagttaggagtctcaggagttcaaattcatgcttaacttcataatgagttagagatcaccctgtatttgtgtgatggatcctaggtatgcaaaagtgcatataattgtgtgtgcacgtacatgtgtgtatatgatcatacatataaatacacacacatataaaatgtattcacacacacaggcatgcacactcacacacataagaatgacactcattgatccatttgaatgatatatgtcttagaattttgctgattataaagtagagggatagtgaaggtctcactcaccaggtgtaaacaattggcagtgtcaggaggatcaggagttcaatttcatgcttaacttcatgagcagttagagatcatcctggaataatgtgatggcccctttgtatgtgcccgtgtgcgtaagtgcctgcatgtatatgcgtgtatattttatgcatatacatacacacaccaacacacacatgcacacagacatgcgggaatgtccctcacggatccatttgaatgatatgtgacctactgctttggaggttatgtatgactgggccagggtgaggtctcacaaaccacgggaaaacccttggtagagtcaggaagatcaggagtgcaagttcatggtaaaggcatgatgagttagaggtcatcctggcattcatgtgattgcccctatgtatgtgtatatgtgttgatgtgtgtgtgcatgtacatatgtgaatatgatatacatatacatacacgcacacataagacacatatgagcacacagacacaggggaatggcactcatcaatccatttgagtgataagtgacttagagtgaaaatgcttgctagagttaagagtatcaggagttcaaatttacacttatcctcatgagagatcagcctgtgattcctccatgtatgtgcatgtgtgtatagttgtgtgtgcatgttcatgtctatatttgaatatacataacatacacacacacgtataaacgcaagcacacatacacagacacaggaatggcattcgccaatccctttgaatgataagtgatgtagagttttagagattatgcaataggggacattgaatggtctcacccaccaggtgtaaaagattgacaaagtcaggaggataaggatttcaacttcatgcttaattcagttagagatcatcctggtattcatgtgaggccatccatgtatgtgcatatgtgtttacttgtatatgcattgcatctgttgacatgatatacaaaacataaacaaacgtgtatatgaaagcacagacacagagaaaaaaattgcattcatttatacgtttgaatgatatgcgacttaaagttttaaagattatgcagtactgggacagtgaacggttttactcaccaggtgtgaaagattgtggatcaggagttctaattcatgctttacttcatgatgacttagagatatgcctgggattcatgtgatgccccctatgtatccctatctgtatctgtttatattttgtgtggatttgagtatatgtatgttcctatctacacaaatatatacatgtacacagacacaaacagaaacacacacacaaacatcagtgcaactcatcgatccatttgaatgacgtgtgacttagagttttaagattcctcagtactgaatggggagaggtctcactcagcaggtgaagtcccttgacagagtcaggtggatcaggagttcaaatttgtgctgaatttcatgatgagttcatgatcagcatgggattcatcttatgcccaccaaaaatgtgcatgtgtgtatagttgtctgcatattcacttctctatatgaatatgcatatacacacatgcacacacattcataggaatggccagagctatgtctcaggaggtgagtactcttgccagtgtcaggaggatgaggagttcaaattcatgtttaacttcatgatgagttagagttcagcatgcgattcatgtgatgcccaccaagaatgtgcatgtgtgtatagttgtgtacataatcacttctgtatatgaatatgcatatactcacacgcaaacatactcccatgaatggcccgagctattaatcagttaggaggtgaatactcttgccagcatcatgaggatgagtagttcaaattcatgtttaactttatgatgagttagagatcagcccggaattcatgtgattttccctgtgtttgtgtttatgtgtatagggaagtatgcctgtacatgcgcgtatatgaacatgcatatatatatatatatatatatatgtatacacacccacacaactagggacacatatatgtgcacacaaacacacatggcagtcatccatttgatttatacgtgcttagagtttcattgagtgtatattcatggtatagtgaataatctcacttatcagatgaaaaccacttgccagagttaggagtctcaggagttcaaattcatgcttaacttcataatgagttagagatcaccctgtttttgtgtgatggaccctaggtatgcacaagtgcatataattgtgtgtgcacgtacatgtgtgtatatgatcatacttataaatacacacacatacaaatgtattcacacacacaggcatgcacactcacacacataagaatgacactctttgatccatttgaatgatatatgtcttagaattttgctgattataaagtagaaggacagtgaaggtctcactcaccaggtgtaaacaattgtcagtgtcaggaggatcaggagttcaatttcatgcttaacttcatgagcagttagagatcatcctggactaatgtgatggcccctatgtatgtgcctgtgtgcgtaagtgcctgcatgtatatgcgtgtatattttatgcatatacatacacacacctacacacacatgcacacagacatgcgggaatggccctcacggatccatttgaatgaaatgtgacctactgctttggaggttatgtatgactgggccagggtgaggtctcacaaaccacgggaaaacccttggtagagtcgggaagatcaggagtgcaagttcatggtaaaggcatgatgagttagaggtcatcctggcattcatgtgattgcccctatgtatgtgtgtatgtgttgatgtgtgtgtacatgtacatgtctgaatatgatatacatatacatacacgcacacataagacacatatgagcacacagacacatgggaatggcactcatcaatccatttgagtgataagtgacttagagtgaaaatgcttgctagagttaagagtatcaggagttcaaattcatacttatcctcatgagagatcagcctgtgattcctccatgtatgtgcatgtgtgtatagttgtgtgtgcatgttcatgtctatatttgaatatacataacatacacacacacgtataaacgcaagcacacatacacagacacaggaatggcattcgccaatccctttgaatgataagtgatgtagagttttagagattatgcaataggggacattgaatggcctcactcaccaggtgtaaaagattgacaaagtcaggaggataaagatttcaaattcatgcttaattcagttagagatcatcctggtattcatgtgatgccacccatgtatgtgcatgtgtgtttacttgtatgtgcattgcatgtgttgacatgatatacataacataaacacacgtgtatatgcaagcacacacacacaggaaaaaattgcattcatttatacgttgaatgatatgtgacttaaagttttaaatattatgcagtagtgggtcagtgaatggttttactcacctggtatgaaagattgtggatcaggagttctaattcatgctttacttcatgatgacttagagatatgcctgggattcatgtgatgccccctatgtatatctatctgtatctgtttctattgtgtgtggatttgagtatatggatgtacctatctacacaaatatatacatgtacacagacacaaacaaaacacacacacaaacatcagtgcaactcatcgatccatttgaatgacgtgtgacttagagttttaacattcctcagtactgaatggggacaggtctcactcagcaggtgaagtcccttcacagagtcaggtggatcaggagttcaaatttgtgctgaatttcatgatgagttcatgaccagcatgggattcatcttatgcccaccaaaaatgtacatgtgtgtatagttgtgtgcatattcacttctctatatgaatatgcatatacacgcatgcacacacattcataggaatggccagagctatgtctcagttaggaggtgagtactcttgccagagtcaggaggatgagtagttcaaattcatgattaacttcatgatgagttagagttcaatatgccattcatgtgatgcccaccaagaatgtgcatgtgtttattcttgtgtacatattcacttttgtatatgaatatgcatatactcacatgcaaacatactctcactaacggccagatctttgtctcagttaggaggtgaatactcttgccagcatcatgaggatgagcagttcaaattcatttaaactttatgatgagttagagatcagtccagaattcatgtgattttccctgtgtatgtgtgtatgtgtatagggaagtgtgcctgtacatgtgtgtatatgaacatgcatacacacacacacacacacacacacacacaccgagggacacatacatgtgcacacaaacacacatgtcagtcagccatttgatttatacgtgcttagagtttcattgagtgtatattcatggtatatggaaacatccaacttatcacatgaaaaccgcttaccagagttaggagtcttctcgtgtcaaattcatgcttaacttcatgtagagttagagatcaccctggatttgcgtcatggaccctaggtgtgtacatgtgcatataattgtgtgtgcacgtacatgtgtgtatatgatcatccctataaatacacacacatacaaatgtattcacacacacacaggcatgcacactcacacacataagaatgacactcattgatccatttgaatgatatatgtcttagaattttgctgattataaagtagagggacagtgaatattctctctcaccaggtgtaaacaattggcagtgtcaggaagatcaggagttcaatttcatgcttaacttcatgagcagttagagatcatcctggactaatgtgatggcccctatgtatgtgcctgtgtgcgtaagtgcctgcatgtatatgcgtgtatattttatgcatatacatacacacacctacacacacatgcacacagacatgcgggaatggccctcacggatccatttgaatgaaatgtgacctactgctttggaggttatgtatgactgggccagggtgaggtctcacaaaccacgggaaaacccttggtagagtcgggaagatcaggagtgcaagttcatggtaaaggcatgatgagttagagtcatcctggcattcatgtgattgcccctatgtatgtgtgtatgtgttgatgtgtgtgtacatgtacatgtgtgaatatgatatacatatacatacacgcacacataagacacatatgagcacacagacacatgggaatggcactcatcaatccatttgagtgataagtgacttagagtgaaaatgcttgctagagttaagagtatcaggagttcaaattcatacttatcctcatgagagatcagcctgtgattccaccatgtatgtgcatgtgtgtatagttgtgtgtgcatgttcatgtctatatttgaatatacataacatacacacacacgtataaacgcaagcacacatacacagacacaggaatggcattcgccaatccctttgaatgataagtgatgtagagttttagcgattatgccataggggacattgaatgtcctcactcaccaggtgtaaaagattgacaaagtcaggaggataaagattgcaaattcatgcttaacttcatttggagacatcttggtattaatgttatgcaacccatgtatatgtatgtgtgcttacttgtatgttcattgtatgtgttgacatgatatacataacataaacacacatgtatatgcaagcacacacacaggaaaaaaattgcattcatttatacatttgaatgatatgtgacttaaagttttaaatattatgcagtagtgggacagtgaatggttttactcaccaggtgtgaaagattgtggatcaggagttctaattcatgctttacttcatgatgacttagagatatgcctgggattcatgtgatgtcccctatgtatctctattctatctgtttttattgtgtgtggatttgagtatatggatgtacctatctacacaaataagtacatgtacagagacacaaacagaaacacacacacaaacatcagtgcaactcatcgatccatttgaatgacgtgtgacttagagttttaagattcctcagtactgaatggggagaggtctcactcagcaggtgaagtcccttgacagagtcaggtggataaggagttcaaattcgtgctgaatttcatgatgagttcatgatcagcatgggattcatcttatgcccaccaaaaatgtgcatgtgtgtatagttgtgtgcatattcacttctctatatgaatatgcatatacacgcatgcaaacacattcataggaatggccagagctatgtctcagttaggcggtgagtatgcttgccagagctaggaggatgaggagttcaaattcatgtttaacttcttgatgtgttagtgttcagcatgcgattcatgtgatgcccacgaagaatgtgcatgtgtgtatagttgtgtacatattcacttctctacatgaatatgcatatactcacatgcaaacatactcacactaatggccagatctttgactcagttaggaggtgaatactcttgccagcatcatgaggatgagtagttcaaattcatgttcatctttatggtgagttagagatcagtccagaattcatgtgatttttccctgtgtatgtgtttatgtgtaaaaggaagtgtgcctgtacatgcgcgtatatgagcatgcatatatatatatatatatatatatatatatatatatatatatatatacatacacacacacacacacacctagggacacatacatgtgcacacaaacacacatggcagtcatccatttgatttatacgtgcttagagtttcattgagtgtatattcatggtatagggaaacatctcacttattagatgaaaactgcttaccagagttaggagtctcaggagttaaaattcatgcttaacttcatgtagagttagagatcaccctggatttgcgtcatggaccctaggtgtgtccatgcgcatataattgtgtgtgcacgtacatgtgtgtatatgatcatacatataaatacacacacatacaaaatgtattcacacacacacaggcatgcacactcacacacataagaatggcactcattgatccatttgaatgatatatgtcttagaatgttactgattatgtagtagaaggacagtgaatgttctcactcaccaggtgtaaacaattggcagtgtcaggaggatcaggagttcaatttcatgcttaacttcatgagcagttagagatcatcctggaataatgtgatggcccctatgtatgtgcctgtgtgcgtaagtgcctgcatgtatatgcgtgtatattttatgcatatacatacacacacctacacacacatgcacacagacatgcgggaatggccctcacggatccatttgaatgatatgtgacctactgctttggaggttatgtatgactgggccagggtgaggtctcacaaaccacgggaaaacccttggtagagtcgggaagatcaggagtgcaagttcatagtaaaggcatgatgagttagaggtcatcctggcattcatgtgattgcccctgtgtatgtgtatatgtgttgatgtgtgtgtacatgtacatgtgtgaatatgatatacaaatacatacacgcacacataagacacatatgagcacacagacacatgggaatggcactcatcaatccatttgagtgataagtgacttagagtgaaaatgcttgctagagttaagagtatcaggagttcaaattcatacttatcctcatgagagatcagcctgtgattcctccatgtatgtgcatgtgtgtatagttgtgtgtgcatgttcatgtctatatttgaatatacataacatacacacacacgtataaacgcaagcacacatacacagatacaggaatggcattcgccaatccctttgaatgataagtgatgtagagttttagcgattatgcaataggggacattgaatgtcctcactcaccaggtgtaaaagattgacaaagtcaggaggataaagattgcaaattcatgcttaattcagttagagatcatcctggtattcatgtgatgcctcccatgaatgtgcatgtgtgtttacttgtatgtgcattatctctgttgacatgctatatataacataaacacacgtgtatatgcaagcacacacacacacaggaaaaaattgcattcatttatacgtttgaatgatgtgtgacttaaagttttcaagattatgcagtagtgggacagtgaatggttttactcaccaggtgtgaaagattgtggatcaggagttctaattcatgctttacttcatgatgacttagagatatgcctgggattcatgtgatgccccctatgtatctctatctgtatctgtttctattgtgtgtggatttgagtatatggatgtacctatctacacaaatatatacatgtacacagacacaaacagaaacacacacacaaacatcagtgcaactcatcgatccatttgaatgatatgtgatttagagttttaagattcctcagtactgaatggggagaggtctcactcagcaggtgaaatcccttgacagtgtcagttggatcaggagttcaaattcgtgctgaatttcatgatgagttcatgattagcatgggattcatcttatgcccaccaaaaatgtgcaagtgtgtatagttgtgtgcatattcacttctgtatatgaatatgcatatacacgcatgcacacacattcataggaatggccagagctatgtctcagttaggaggtgagcactcttgccagagtcaggaggatgacgagttcaaattcatgtttaactcacattgagttagagatcagcatgcgattcgtgtgatgtcctccaaatatgtgcatgtgagtatagttgtgtgcatattcacttttatacatgaatatgcatatatactcatgcacatacacgaatgtcactcatatatttttttgaatgttatgtgactcagagatttagagcttatgcagtactggtccagagctatgcctcagttaggaggtgaatactcttgccagagtcaggaggatatgaagttcaaattaatgtttaacttcatgatgagttatagataaggctgtaatttatgtttttgcctctgtgtacgtgtatatgtctataggtaagtgtgcttgtacatgtgggtatatgtatatgcatatatatacacatatatggacacatacatgtgtacacaaatacacatggcaatcatccatttgatttatatgtgcttagagttttatagagtgcatattcatgggacaggaaacatctcattaatcagatgcaaaccatttgccagagtcaggaggatctggagttcaaattcatgtttaacttcatgatgagttagaaatcgtactggatttatgtgatggaccctaggtatgtgcatgtgtgtgtaactttgtgtgaatgtacatgtatgcatataattatacatatacatacacatgcatgcacacatacagacttgaatactcacacacataagtatgactctcattgatcaatttgaatgatatatgtcattgaattttattgattatgaagtagaaggacactgaatggtctcactcaacaggtgtaaaaaattgacannnnnnnnnnnnnnnnnnnnataagtgtgagcatgtatatgtgtgtatattttatgcatatacatacacacacctatatacacatgcacacagacatgcgggaatggccctcacggatccatttgaatgatatgtgacctactgctttggaggttatgtatgactgggccagagtgaggtctcacaaaccacgggaaaacccttggtagagtcgggaagatcaggagtgcaagttcatggtaaaggcatgatgagttagaggtcatcctggcattcatgtgattgcccctatgtatgtgtatatgtgtttatgtgtgtgtacatgtacatgtgtgaatatgatgatatatacatacacgcacacataagacacatatgagcacacagacacacaggaatggcactcactcatcgatctatgtgactgtgagctttggagattatgtatgactagatcagggagagttatcacccatcatattaaaaatgcttgtttaaatcaggaggtcaggaggtcaaattcatgctttatttcatgatgacttagagatctgcctgggaatcatgtgatgcccccatgtatgtgtatatgtgtgtaactgtgtgtggatttgtgtacatgaatatacatacctacacacacgtagacccatacacagacacacatatgaatgccactcctcagtccatttgaatgatatgtgacttagagttttaagattcctcagtactgaatagggagaggtctcactcagcaggtgaaatcccttgccagagtcaggtggatcaggagttcaaatttgtgctgaatttcatgatgagttggaaatcagcacgggattcatgtgatgcccaccaagaatgtgcatgtgtgtatagttgtgtgcatattcatttctctatatgaatatgcatatgcacacatgcacacacattcataggaatggccagagttatttcttaggtaggaggtgaataatcttgctagagtcaggagaatatggtgttcaagtttatgtttaacttcatgatgcattagagatcagcatgtgtttcattgatgcacaccaaaatgtgcatgtgtgtgtagttgtgtgcatattcacttctctatgtgaatatgcatatacacacatgcagacacaggaatggcactcatatatcctttggaatggtatgtgactcagagctttagagcttatgcagtgctgggccagagctatgtctcagttaggaggtggatgctcttgccagcgtcaggaggtcccagagttcaaattcatgtttaacttcctgatgagttacagatcagcctgttattcatgtgattgtttctgtgtatgtgtatagataagtttgtctgtacatgcggatatatgaaaagacatatattgacacatattcacacatgcatgcatacagaaacacatggcagtcatccataagttttatatgtgcttagaatttcatagagtgtatatttatggtacagtgaaatatctcgccaactagatgaaaaccgcttgccagaatcagaagtcttggagttcagaatcatgcttaacttaatgatcagttagtgatcatcctggattcgtgtgatggaccctaggtatgtacatgcacacataattttgtgtgcatgtacatgtgtgtatatgattatacataacacacacacacacacacacacgtataaaagcaagcacacacacaccaaggtatggcattcatcgatccatttgaatgatatatgtcttagaatgttactgattatgcagtagaaggacagtgaatggtctcactcacaaggtgtaaacaattggcattgtcaggaggatcaggagttcaatttcatgcttaacttcatgagcagttagagatcatcctggaataatgtgatggcccctatgtatgtgcctgtgtgcataagtgcgcgcatgtatatgcgtgtatattttatgcatatacatacacacacctacacacacatgcacacagacatgcgggaatggccctcacggatccatttgaatgatatgtgacctactgctttggaggttatgtatgactgggccagggtgaggtctcacaaaccacgggaaaacccttggtagagtcgggaagatcaggagtgcaagttcatggtaaaggcatgatgagttagaggtcatcctggcattcatgtgattgcccctatgtatgtgtatatgtgtttatgtgtgtgtacatgtacatatgtgaatatgatatccatatacatacacgcacacataagacacatatgagcacacaggcacacaggaatggcactcactcattgatctatgtgactgtgagctttggagattatgtgtgactaggtcagggagagttatcacccatcatgttaaaaatgcttgttagaatcaggaggtcaggagttcaaattcatgctttatttcatgatgacttagagatctgcctgggaatcatgtgatgtccccatgtatgtgtatatgtgtgtaactgtgtgtggattgtgtatatgaatatacatacctacacacacatagacccatccacagacacagacacacacacgcatgccactcctcagtccatttgaatgatatgtgacttagagttttagagattctgcagtactcaatagggagaggtctcacaccacagagtcaggtggatcaagagttcaaattcatgtttaacttcatgatgagttagagatcagcatgctattcatgtgatgaccataaagaatgtgcatgtgtgtatagctttgtgcacatacacttctctatatgaatatgcatatacacgcatgcacacacactcactcacaggaatggccagagctatgtctcagttaacttaccaggtaaaacgcttgccttttggatcagcagttcaaattcctgaataacttcaaaatgacctagggatcagcctggcctcatggcatcctccccccatatatgtgcatgtgtgtatagttttgtgtatatgtacatgtgtgtatacaaatatacatctacatacagacaaacataaacacacaggcacgcacacacacacacacacacacgcgcacacacacagaggaatgtcactcattgatccttttgaatgacaggtgactcagagctttagagattatgcagggctgggccagtgagtgctctcactcacaaggtgaaaatgcttgcttgccagactttggatgaccaggaatcaaaattcatgctgaacttcatgatgagttcgtgatcagcttcggagtcttgtgatgaccctagtatatatgcctgtgtgtatatgtatgtgtgcatgtacatgtgtgtatatgaatatacatatacatacacacatacccatacaaacatgcatacaaacacacaaaaattggcactcatccatctatttgaataattagtgacttagagtcttagagattctgtatgactggggctgacagagagaggtctcagtcaccaggagaagacttgctagattcagggtgatcaggagtgcacattcatgttaacggcatgatgagttagagatcagcctggcattcatgtgatgcctccatgtatgtgcatgtgtgtatagttgtgtgtggatgtgtgtatttgcatataaataacatacacacacacacacaagtaaacacaagtgcacaaacagacacaggaatgccattcatcgatccattggaatgataagtgatttagagttttagagattttgaagtagagacggtgaattgtctcactcaccagttgtaaacgattgaaagagtcaagaggatctggagttccaattcactcctatgttcagctagatagcatcctggtattcatgtgatatcgcccatgtgtgtgcatgtgagtatagttgtgtgtgcatgtctgtatttgaatatacataacatacacacactaatgcaagtacacacacacacacacacacacacacacactcacaccaatgccactcatcaatccattggaatgatgtgtcacttagagtattagagattatgcagtacttggccagtgagtgctctcagtctctaggtgaaaatgcttgctagagttaagagtattcaggagttaaaacacatactgaccttcatgaggatttagagatcagcctgtgattcatgtgatggccccatgattgtgcatgtgtatatagttgtgtgtgcatgttcatgcatgtatttgcatatacataacatacacgtataaacgcaagcacacacacatagagacacaagaatggctttcatcgatccctttgaatgatatgtcacttagcatattagagattatgcagtacttggccagtgagtgctcttattctctaggtgaaaatgcttgctagagttaagagtatcaggagtttaaattcatgcttatcctcatgagagatcagcctgagattcctccatgtatgtgcatgtgtgtatagttgtgtgtgcatgttcatgtctatatttgaatatacataacatacacacacacgtataaacgcaagcacacacacagacacaggaatggcattcattgacccatttaaatgatatgccactcagagtagtagagattattcagtatggggcaagtgagtgctctcattctctaggtgaaaatgcttactatagttaggagtatcagaagttcaaatttatgcttatcttcagcatgatttagagataagcctgtgattcatgtgatgccttaagtgtacatgcaggtttgtatagttgtgtgtgtatgttcatgtgtctatatggatatacataacatatacatagacatataaaccctagcgtgcacacacacacacacacacacacacacacacacacacacacacacacgaataacattcatagatccatttatatgatatgccacctagaatattagaaattattcagtactgggccagtgagtgctgtcattttctaggtaaaaatgcttgctagaatcaggagtatcaggagttcaaattcatgcttatcttcaggaggatatagatatctgcctgtgattcatgtgattgccacccatgtatgtgcatgggtgtatagttttgtgtacatgtgcatgtgtgtatatgaatagacataacatgcacatacatataaacacaagcacacacacacacagagacacaggaatgacactcatcgatccatctgaatgataggtgacttagagttttagagattatgcagtagtgggacagtgaatggtctcaatcaccaggtgtaaaccacagagtcaggaggatcaggagttcaaatccatgcttaatttcagttggagatcatcctggtatttctgtgatgctacccatgtatgtgcatgtgtgcttacttgtatgtgcatgtgcatgtgttgatatgaatatacataacataaacacacgtgtatatgcaggcacacacacacagaagaaattgcattcgtcgttacgtttgaatgatatatgacttagagctttaagagtatgtattactgggccaatgaaacgtcttacttaccagtaaaaatgtttgttatattcagatggatcaggggtccaaattcatgagtaatttcaaaatgacatagagatcagcctgacttcacggggttccccccaatgtatgtttatgtgtgtatagtttatgtgcatgtgcatgtgtgcatatgcatatacatatacatccatacaaacatatagaagtagcacagatacacagacacacacacacacacccatcaatcattttgaatgacaggtgacttagagttttagaaattatgctgtgctgggccagtgagtgctcttagtcaaaaggtaaaaatgcttgccagagtcaggaggatgagcagtcaaaattcattctcaacttcatgatgagtctgggatcaacttcggattcatgtgatgcccccaatctatttgcttgtgtgtatatgtatgtgtgcatgaacatgtgtatatgaatatacatatacatacacacatacccatacaaacatgcatacaaacacacagaaaatggatactcattgttctattgaatgatatgtgtcttagagtcttagagattctgtatgactgggccagggagaggtcacactcaccatgtgacgccccttgccagagtcagggtgatcaggagtgcaaattcatgttaactgcgtgatgaggtagagatcagcctgtcattcatgtgatggcccctgtgtatgtgcatgtgtgtttgtgtgtgcgtacatgtacatgtgtgtatatgaatatacatatacatacacgcacacatagatacgcacgcacacacacacacagggatggcactcatcaatccatttgaatgataagtgacttagagtgaaaatgcttactagagttaagagtatcaggagttcaaattcatacttatcctcatgagaatttagagatcagcctgtgatttatgtgattcctccatgtatgtgcatgtgtgtatagttgtgtgtgcatgttcatgtctatatttgaatatacataacatacacacacacgtataaacgcaagcacacatacacagatacaggaatggcattcgccaatccctttgaatgataagtcatgtagagttttagagattatgcaataggggacattgaatggtctcacccaccaggtgtaaaagattgacaaagtcaggaggataaagatttcaaattcatgcttaattcagttagagatcatcctggtattcatgtgatgccacccatgtatgtgcatgtgtgtttacttgtatgtgcatgtgcatgtgttgacatgaatatacataacataaacacatgtgtatatgcaagcacacacacacacacacagagaaaaaattgcattcatttatatgtttgaaagatatgtgacttagagctttagcaattatgtagtacttggccaatgaaacttcttacttaccagtaaaatgtttttcatattcagatggatcaggagttcaaattcatgagtaacttcaaaatggtgtacagatcagcctggcttcatgggatcctccccaatgtatgtgcatgtgtgtatagttttgtgtgcatgtgcatgtgtgtatatgaatagacatatacatccacacaaacatatacaagcaagcacagatacacacacaggaatggcactcatcgatccatttgaatgataggtgacttagagttttagagactgcagtagtgggacagtgaatggtctcagtcaccagctgtaaatgattgacaaagtactggagaatcaggatttcaaattcatgattaacttcagttagagattatcctggtattcctgtgatgccacccatgtatgtgcatgtgtgtttacatgtgtgtgcgtgtacatctgtgtaaatgaatatatatatatatatatatatataacataaacatacatgtatatggacacacgtatgcacacatacacacaaggaatggaattcattgatatgtttgaatgatatgtgattttgagctttaaaggttatgtagtactggtcaaatgaaagtttttctcactatgtaaaagcttgccatattcagaggggtcaggaattcatattcataaataaattcaaaagagagtagagatcagcctgattttatggggttccccacaatatatttgcatgtgtgtatagttttgtgtgcatgtgcatgtgtgtatatgaatatacatatacatccacacaaacatatacaagcatgcacagatatacacacacacagaaatggcacccatagatcattttgagtgacatgtgacatgtgacatgtgagttttagagagtatgccgtgctgggccaatgaatgctctcactcacaaggtaaagacccttgccagattcaggatgatcaagagtgtaaattcatgttggttgcatgatgagttggagatcagcctggcattcatgtgatggctcctgtgtatgtgcatgtgtgtttgtgtgtgcgtacatgtacatgtgtgtatatgaatatgcatatacatgagagcatacatagacacacgtgcatgtgcgcttgcatgcgcgtgcgtgcacacacacacacacacacacagaggatatgtgatttacagtcttatagattatgtagtagtgggtaatgaatggtcgcactcatcatgtgtaaacaatttgcagattcaagaagatcaggagttcaaattcatgcttaacttcagctggacatcatcctggtattcatgtgatgccacccgtgtatgtgcatgtgtgtttacaggtgtgtgcatgtgaatgtatatatatgagtatacatgtacagacacatgcagcacacacacacacacgaatgccactcattgatccatttgaatgatatgtcacttagcatattagagattatgcagtacttggccagtgagtgctctcattctctaggtgaaaatccttgctagagttaagagtatcccgagttcaaattcatacttatcctcatgagagatcagcctgtgattcctccatgcatgtgcatgtgtgtatagttgtgtgtgcatgtttatgtgtgtatttgaatatacataacatacacacacacgtataaacacaagcacacacacacagacacaagaatgacactcatcaatccatttgaatgataactgacttaagagttttagagattatgcaataggggacagtgaatggtttcactcaccaggtgtaaatgattgacagagtcaggttaatcaggatttcaaattcatgcttaacttcagttatagatcattcatgtgatgccacccatttatgtcgatgtgtgttttcgtggtgtgtgcatgtgggatgtatgtatatgattttgcatatacagacacatgcacacacatgcggcacacacacacacacacaaatgacactcatcgatccatttgaatgatatgtcacttagagttttagagattatgcagttctgggacagtgcgtgatctcactctccaggtcaaaatgtatgctggaatcaggagttttaggagttcaaattcatgcttaacttcatgatgattttaagatcagcctgtgattcatgtgattctcagccatgtatgtccatgtgtgtatatttgtgtgtgcatgtgcttgtgtgtatgtgaatatatatatcatacgcacgcacacacacacacaaatgcaagcacatacactctcacacacagaggaattgaattcatccattaatttgaatgctatgtgacttattcttttagagattatgcagtagtgggacagtgaacggtctcactcgccatgtgcaaacatattacagattgagcagggtcgggagttcaaattcatgcttaacttcagctggacatcatcctggtattcatgtgatgccacccgtgtatgtgcatgtgtgtttacgtccctgtgtatgcacatgtgtgtatataaatatacataccataaacatacatgtaaatgcaagcacacaaacatggaatggcattcattgatacatttgaatgatgtgtgacatagagctttaaagattatgtagtattgggctaatgaaactttttactcacaatgtgaaaaagcttcccatattcagaaggattaggagttcaaatttatgaataacttcaaaatggcttagagatcagcctggctttatgggttccttcccagnnnnnnnnnnnnnnnnnnnnnnnnnnnnnnnnnnnnnnnnnnnnnnnnnnnnnnnnnnnnnnnnnnnnnnnnnnnnnnnnnnnnnnnnnnnnnnnnnnnnnnnnnnnnnnnnnnnnnnnnnnnnnnnnnnnnnnnnnnnnnnnnnnnnnnnnnnnnnnnnnnnnnnnnnnnnnnnnnnnnnnnnnnnnnnnnnnnnnnnnnnnnnnnnnnnnnnnnnnnnnnnnnnnnnnnnnnnnnnnnnnnnnnnnnnnnnnnnnnnnnnnnnnnnnnnnnnnnnnnnnnnnnnnnnnnnnnnnnnnnnnnnnnnnnnnnnnnnnnnnnnnnnnnnnnnnnnnnnnnnnnnnnnnnnnnnnnnnnnnnnnnnnnnnnnnnnnnnnnctaatgtatgtgtgcatatgaatatacatataaatacacacaaaacacatacacacagggggcacacacacacacacacacacacacacacacatacacacacacacacacacacacacacacataccccgaatggcactcattgatacttttaaatgacatgtgacttaaagttttagagattatgcagggctggatcagtgggtgctctcactcacaaggtgaaaatgcttgccagagtcaggaggatcaggagtggaaattcattctcaaattcatgagtccaggatcagcttcggattctagtgatgcccccagtgtatgtgcctgtgtgtatatgtatgtgtgcatgtgcatgtgtgtatatgaatatacatatacatacacacatacccatacaaacatgcacacaaacacacagaaaattgacactcatcgatccatttcaatgatatgtgagtcttagagattctgtatgactgggccacagagaggtctcactcaccaggtgacgccccttgccagagccaggatgatcaggagtgcaaattcatgttcactgcatgatgaggtagagatcaacctggcattcatgtgatgacccctatgtatgtgcatgtgtgtttgtgtgtacatgtacatgtatatatatattgatatacatataaatacatgcacacatattcatgcatgcacacgcacacattaatggcactcttagatccatttgaataacatgtgacttagaggtgagagattatgcagtacggggacagtgagtgttctcactcatcaggtgtagacaactgccagagtcaggtctatcaggagcttaaatgcatgcttacactcatgaggacttagagatcagcctgtgatttatgtgattccccccatgcatgtgaacgtgtgtatagttgtgtgtgcatgtgtgtatatgaatatatataacatccacacatgtataaatgcaagcacagaaacacacaaacataggaatggtactcatcgatccatttgaatgatatatgacttagagttttagagattatgcagtagagggacagtgaatggtctcaatcaccaggtgtaaatgattgacaaagtcaggaggatcaggagttcaaactccatttagagatcatcctggtattcatttgatgccacccatgtatgtgcacgtgtgcttacatgtgtgtgcatgttcatgaatgtatatggatatgcatgtgcagacacacacacacatgcaacacacacacaaacacatggtgacttgcattcatctacttgcataatatgtgactaagagttttaaagattatgcagtactgtgcccgtgcatgctcttactcaacaggtcaaagtgcttgccagagtcaggccttaaaggtatgtgacttagagtttgagagattatgcagggctggatcagtgggtgctctcactcacaaggtgaaaatgcttgccagagtcaggaggatcaggagtggaaattcattctcaaattcatgattaggtagggatcagcttcagattcatgtgatggcgccccccccccccagtgtatgtgcctgtgtgtatatgtatgtgtgcatgtgcatgtgtgtatatgagtatacatatacatacacacatacccatacaagcatgcacacaaatacacgcaaaatcgccactcatggatccatttgaatgatatgtgacttagtcttagaggttctgtatgactgggccagtgcgtgatctcactcaccgggtgaataatccttccagagtcaggaggatcaggaattcgaattcatgcttaacttcataatgagttagagatcagatgcgattcgtgtgatgcccaccaaaaatgtgcatgggtgtatagttgtgtgcatattcatttctctatatgaatatgcatatacacgcaagcacacacaggaatggcactcatatatccttttgaatggtatgtgacttagagctttagagtttatccagtaacggaccagagctatgtctcagttaggaggtgagtattcttgccagagtcaggaggatcaggaggtctaatttatgtttaacttcctgatgagttagagatcatcctggcattcatgtgatgcccaccaataatgtgcatgtgtgtatagttgtgtgcatattcatttctctatatgactatgcatatacacacatgcatacaaactcacatacaggaatgacagtcatatatccttttgaatgatatgtgactcagagctttagagcttatgcagtactgggccagagctatgcctcagttaggaggtggatactctttccagagtcaggaggatacggagttcaaattcatgtttaacttcatgatgagttagagatcagcctggaattcatttgattgtccttgtgtatgtgtatatatgtgtaggtaagtgtgcttgtacatgcatgtatatgaacatacacacacacatacatatacacataagaatggcagtcatagatctgtttgatttatatgtgcttagagttttatagagtgtataattatgggtcagtgttacatctaactcaccaggtgaaaaccacttgccagagttagaaggatcaggaatttaaattcatgcttaacttcctgataagtttgtgatcatcctggcattcatgtgatgcccaccaaaaatatgcatgggtgtatagttgagtgcatattcatttctctatatgaatatgcatatacacacatgcacacacacacacactcacacacaggaatgacactcgtttatccttttgaatggtatgtgactcagagctttagagcttatgcagtactgggccagagctatgtctcagttaggaggtgaatactcttgccagcgtcaggaggtcctggagttcaaattcatgtttcacttcatgatgagttagagatcagcatgcgattcatgtgatgccctcccccatgtatgtgcatgggttcatacttatgtgtgcatgtaaatgtatgtatatgaatgttcacatacatatacataaacacacacactggcattcacctacacgcacattagtggctctgatcgatctatttgaatgagatgtgactcagagctttagagcttatgcagaacggatccagggctagttctccctccaggtgaaaatggcttctgtggaaacctgacagcctgagttggatctctggaactcagcacacaggcaggctatggtgtgattcttttggtttttcgtacacctgatgattttctttgagttttcagattgcaatatatcttaatttaaaatttatcgttcatctggctcgggagactggaatacctccctcattaatagctgtcttctctttcattctctatgaaaaagggtcacttttaattgaatggggttaagaggtaaagctgggttgctcttaatattgaaaacatttctggtcgttaaaaactaagaatccttttgcttatttaataattctttaagaatttttttaaagtgttgtttttccctgtcaacacttgatatttatatgatattagagtctatttttggtgatatctttgtctcctaacataattcaaactagaatgctgtgcttgcttttacacagagaagtgctttaattgttgtacgaaatgtgtcccagcctaattctttttctgtaagaagcagcgttgtggctagtgttcaggtcaaatggactctctggttcctctgcccttgcctaaggttctgttgtttttctgcagtattccctgatcgtaaataagaagaactcatgggaatgcatgaatgcctactgttttaaatgaccttggagcaccctgagacataggcgaatattgcacttcttctcactgctttcgttggttttccgttgatttttgggtctaaaataccagcgcctggtcccgtgttaggacaccaaagcagagcccactttgcaagtgttttctcgtccattatggccgtactattagaaatctgttctcaaggctcattcctgctccgccattcttgccatccttgttgctgatgtctgaactcacagctgagggtttggactcagtgtttcttttctagtgggacccacttcttctctctcctgaagagctgtgtctctttcctaggttctgtgatggtgatgtctttgttttctttttctcttccttcccttcccctcatttcctctcctctccctcctttcccttcccctcctctctcttctcttgtcccttccttcccctgttctccctttccctcttgtcccctcccctcccctgtgtttccttcccctctcctcccatcccttcccctctgttttttgtccttccctttccttctttccctctttcactgtttaaaaaacatagattctggagatgaaactcaggtttttatgcttgtcaagcaaagccctttactgactgagtcatctttccagccagctgactttttgacttttttacatttgtctcctctgttttctgtcgggaaatctgagcgccataaagggaagacttatgtcagtttgcttcacctctctaatgcttgtattagaactgccccacacccagcatgcagagggccggcttactcttttcatgggtgaaggaacgagtgtctaggatagaggtcaggcacatccttgaggactgacagtctaacaaggtggctttaactgtagtttattaaatgtctcattcccaacagacttcaggatctgagtgtctttcccgttgtctagctggaacatagcaagcatgatatccttttgctactttcttattatgatggcacagcttgtatagctaggctacatggaagaggggattttattgttatgctgtctgctttataagagagtgaaatcctaccttaaactttgctggtaaccctattctaaggcatagacaaggggcacagggcctctgaggtagccttgaggctgtcctgactcactttatatatatgtatatatatatatatatatatatatatatatatatatatatatatatatgtttcttattaggtatttccctcatttacatttccaatgctatcccaaaagtcccccataccctcccacccactcccactttttggccctggcgttcccctgtagtggagcatataaagtttgcaagtccaatggacctctctttccagtgatgaccgactaggccatctttagatacatatgcagctagagtcaagagctctggggtgctggttagttcatattgttgttccacctatagggttgcagatccctttagctccttgggtactttctctagctcctccattgggggccctgtgatccatcttatagctgactgtgagcattcacttctgtgtttgctagacagctctatcaggatcctttcagcaaaatcttgctagtgtatgcaatggtgtcagtgtttggaagctgattgtgggacggatccccggatatggcaatcactagatggttcatcctttcgcctgactcacttctatatcagaatgtggcctcactcattctggatagaatctggactggtgaagctgaagggtgatggtgtgtgaagcgtgcgtgtgtgtgatgtgtgtatgcatatgtgtgtgtgtgtgctgtgtgtgtgtgtgtgtgtgtgtgtgtggtttgttgtatggtgtgtgtgatgtgtgtgtatgaatgtgtgtttgtggtttatttgtgtgatgtggtgtgtgtgtgtgggtgtgtgtgtgtgtgtgtgtgtgtgtgtgtgtgtgtggtgggggaacatcactcatgcaagagtcacaccttgtaaagaacttttgctgacacatagtctgactttgcattatactagcacaaagataactttttgtcactgaagtccttttccagttactagtgaaaacttgaaaaagtacaaaaaagttgaagatatttgtcacaagttcaaaacaatttcttttttatatttttctcttctttacatcttttgcgtaattctagtaatttcatatgtctgcaattagtccttttagctgaaggacatagcattttttttcataatttccctgccccaaccatgcaatatcatgcctatatgatatcttaggggcttagagggggtcttgagtcaatcttgtatcattttctgttcatggagagttacttttgccttctccaagtttcgtaaagttgctgtacatttcccaacatataactcattttctcagttagtggggtcacttttctgagataaattcctaggactgaaaccatgtcaaagggcatagctctttatactgttaagtttttcaaaggcactgtccatttgctcagccagacttaatggctgtttgttgtctgttcatttgtatcacaagaaaaatgggtcaccaacctcttccctcttacttgcataccctttggaaagtcggcattcaaagtaaagagtcatgaagacttaaatgcctttaatggctgtcattcacgtagtctgggtaggtggcttcttagaaactgtaatggctggagggggtttatttcctctttattttttttctcctctttgctgttttctttcctcccccttggtttaaaacctgttttcctggctgtgcttaagcctccgttcttcttgttctgcctctgttgacgaatgagtgtaattgacccctgttgtctctattatacattctgcggcaatttgttttttatgtagtagttattttctgagctgccttaaaactgccttccaaaaagagctcattaccagctcaaaggaaaagaattttaaatgacagagtgaataacagtcccaaggagaagggggaggacatgtctaagccattccaagtttcaagtaagtgggtagttttagggtccagataattaattgctgctcaggtgaagcccagcaagacttgattctatctaggaattattagattaaaaatagcttccccgtggacactgttgccctctggatgtatagacggattatatccaggtccaagatgacaatttacagcccattagaagttagttttggaaaacctggctaaacatctatgcgctacaatcaagggtgacttccaaataagagcattttatctgaacatacatcagccacacagaacacccaaatacagttcacacaattctatgggtattagaaaatagatgctagacagaagccaaggctgaccttagctgcctcagcttccacttgttttgagctcaaaggactttgtatgttcatagaaaaggtgaagccccaccgggggaaagtaaacagtggggggggggggttgtgaattttaacacagaactgagggcagtgcgaggagcagaggctggtgtggcaaagcccctggaagtgaaggaagcaggcctgtgagtggctggctttggtaccttcctgctgagggtgctgaacagagaactgggagccaggnnnnnnnnnnnnnnnnnnnnttcttaagtgttttcacttgctcatcaaggatgcgtctcctgcttgcaaagactttactctttggttctaaatgaacgtttcttattatttttctaggagatcccccctgccagggggaatcatttgcctgaaatccagctcagctaagaccatgttatctgtgtttcctccctcccaggttactcaggccaggattttaactgggtggattaccacaagcagcgtcaggcagaagaagcacctcatttctgcttcaaaaatgtaagattctccccattcgctcccatttaaatttgtagatgctattccctgtacgttttgtgatgttcctcctatttggtgaccgcgtatggagtactggctggcacaggaagaccgtgaaaccaccactggttttgaacaagcttcatttcatattgtgtgtgttaggatagcaccaggctgctctgataaactgactaacaagtgcacattagcttgaccgtgtttgagcttagtgtctactttcagaagagtcaagggtaagagagagtctgctcctgatgtttactaaaatgtgttatcctggcctggggatgaagcttacttgatagaatgtttgcctagagtgtgggaagccctggtatcattcccagtcctgcacaaaccaggtgcggtagtctatgcctgtcatcccttcactttgtaggtaaaggcaaaaagactagaggtccaaagtcattcttggattcacagtgaattcaaatctagcccaggctacaaggaaccattatacaagaaacaaacaaagaaacaaacactttaggaagtgctttcgttactcgtaaggtgacagccaaacagctttgactatgtctactttaaaacttacattattgccatgacagctgtgttttagtagcatgaacgagtaatggacggatgaacttactgaataccaggaggtagtaaggtaaagtttggtaaagtgattgctagattgttctcttaaagtttcatcaagcctggagactgtagggaggggtatgaaacattacctcaattccaaaaacaaagcatagctatgctaagcgtgttcaatatacctgtggttgggaattccctaggctaagaagagatgacacactctttgaaccgcagctcctaccctacataatatcactacccgaaaggcttgcttctgatctcgtgtgcccagagctactgaatagccattcaatagactatccacctcacagggatagcaggattcaaagagcaagaatggaaagccttggtttcacagacgcacatctgagcataagtcaaaatgaagtattttgaattctggggtcatgaacactcttaggtatagaggaacatgagtggtggagttagagatcagggctctcctgcctgcttggttaatgatagttgtatggaatggtttctatacagaagtatgggactgttggggatggggttcgagctgtgtgatggggacaggtatggctatgctccaggtccccttgaggcttatcaaatccagtaacacatgcctttttattatgttgctgtcaccgtctcagaatctactggcctgtctttcatggatgactgaggtcacggaggcccatgaagccacaaaacctgttccaggttgggagttctatctcacaagagnnnnnnnnnnnnnnnnnnnnnnnnnnnnnnnnnnnnnnnnnnnnnnnnnnnnnnnnnnnnnnnnnnnnnnnnnnnnnnnnnnnnnnnnnnnnnnnnnnnnnnnnnnnnnnnnnnnngaagatacagtagccagcgctgggattattatatgctgcccccatggctttttcatgggtgctgggtatctgactctgatacttatgcttaaagtgcagatatattacctactgagccatctctccagcccctagaaatttcccttttatccatgagtgtctacacggcatttcattctggagcaattaaccatagaccaggttggctttggatcgtccaggattcagtcaacaagattaaatctggcttaatgaatttgctggtgtattcattaggagcgcttttgtttctggctccccggttatttaatagacaggagagtggtctgcctgctggcatccgcatcgcatactggcactctgctgaatttgttagcttgctacaagtgctctttaatggaatgcttattaggaattcattttttaatcacgcatctcatgtgtaccagaggagagctgtgtggaagacatttccctggggatgttttaacaatcagagttggttacaggatggattgacatagccaaatgctcagtaaaagaaacccagaggtaacagttttgttattgatcctttataaatcaccctcaagcagcgagaggaaatgaaaagaggttatgtggttgtagcttttccttattaagtgagatgaaatgctttgtaacttcggcattctccactcagccatccagctgtgctaccagaaagaggcttcgtacataattgtgtgaatgagatagggcgacttatggggaaaaaaaattaaaaaaaaaaaaaacacaccctctgaaaacatgtctgattcttatctccagagaaaagggaatggaaggagcaaagcgactgtcagtggcaggacatgacttttgttttgattacagaaggatacaattgccttctcaacttcttttataaaaagacacttaaatctaaattactctgatttctctccccacacgagtcatataatgatatagtcttttattggtcttaggaatctgtttagatgagtttatatatttcaaagtagatgcacttttttttatagtactctagcatatttgattgcgatttatagtagctgctgcctggggaaagtcacatttattggagagtaatatttggtgagagtcttgttcatcgtacagagaaaactcatacagaactgattctctggaaactccagacttaacttacttaactccagactcaggaccaaaacaactcacatgagagaagtagaacacacacacacacacacacacacacacacacacacacacacacacacacacacagagcaagcaggtggagagaaggacccggagagtgttcagatttccatactcacagtatgacgacaacccaaactgacaacacatggggcaactaaaagagttgtgtgaaactcagtctttctgccctcatatgtcagactctagcgtccagacaaatattgcaaacacagatatggggaaagtaagataacatttcagacagtggagaaccatacaggcaaagcccaaattttgttcattaaatgctacttcttgcttgaatcatctacgtttaagaaatctctcattagcctggatgaggaaagaagaaaattatagacatttaaactgcttataaagagacagagtttatcaattgactcagctaagaagatgatttgctaaaacagaaaacaaaaccagaaatcccatagccctggagggatacagcacaacccagaggtcctgtgccatagatttagatacatgtttcattcaagagtgtcccaagacatgcagaagctgaaaaacccatattactcctgagaaggaagaaaaaggcaagcagacccagcatgctccagatatcaggattggcagccacgtattgtgcggcctttcttggactgctggaattccagtgatggaaaacgtggctcctgtatttctgatacaccctggagtttgagaacagttgatggcaaggaaagtgtctttgttattcacgtgaagataggaaatgaatgctgtcaacggaagaagctctggaactgagaagaatctattgaactaaaggagttcactggagtggttttactagaactagaccggaaatgagaggccctgatcttgaatgcagacattacagaagattaaaaacaaaaattaaaacaaccagccaaccaaacaaattttgaaaatggttcaatgtccctcaaccggcaaatgggttgataaagggtggtgcatatacatgaactattcagctataaagtaaagggtagaccatgtatgactcttgcaggaatgatctacaaatacattttgcttcatactggtttcatttctcttgctgtggtaaatatcttgactaaacgcaacttaggtggaaaattccagcttacagacttcagataaaagcagggaagtcaaggcaggtcctccaagctggtcgcttaatagctacagtcaagaacaaaagcaaagctccgcctctgtttacttgctcataacccagtccaggaaatgtttgcatcacattaggataggactttcctctttcaaccagagatcaagacagtcccccaccacacgctcttaggccaacctgatctgaataatttttcattaagactctgcccagattattcttgtgagaagtggacttttttttttaaatgcacagcaagtgttgttcttttttggtttgctttattttgttttgttcccctctaaagatttatttattcactttctgtatgtgagtacactgtagctatcttcaggcataccagaggaaggcttcagatcccattacagagggctgtgagcaaccatgtggttactgggaattgaactcaggacctctggaagataagccatcttttagttttaacttttaaaactgaccatcgactaagtaagagaagacagactagactcataaaagcttcatagagtgcagttctatctatgtgatgatataaaataagtagatggaatatagaaatgaaagccacatcgatcgctagtaggaactgagcatcaaggactgggtatgcagggctagtgcaagggtgcttggaggagaggggcaaggggctgttctgcatcatatggctgtgtgcactgggtcagcaaatttatctttatagatcaaccagggtttcccaaacagtggattttactatatatagtttttggtgtgtgtacatgcatgcatgtgtatgtttacggtatatgggtgggagtgtaccggtttcaggtatgtaagtgtgtgagtgcgtgagcaggcctgaggacaacctctgatgtcattcctcagatatcatctacttttattcttttttaaacacaaagcccctgctgacctgaagctcccaggggctaggctgaccagttaacaagccccaaggatatgcctgtctctttcagcagtgccagggtcgccagtaaaggctgctacaacctgtatttttttttttttttttggtttctgtttatttaaaaaaaaatggattgaaggggttgagctaagatcctctagattaaatgacaagctttttactgactgagctatctctctgtgtctcccagctcctactgtgtaaaaatgctgcatatgtagcagaagatggcctagtcggccatcatagggaagagaggccccttggtcttgcaaactttatatgccccagtacaggggaacgccaggagtgagtcggtaggggagcagggtatagggaaatttcgggatagcatttgaaatgtaaataaagaaaatatctaataaaaaagaaaagtaaagagaaaagtattaagaaaataaaaacaatttcagttaaatgcaaactaaggaatgtatcaccaacagacccatgctataagctaaagggcattctttaaatgtcctttaaaagaaaatcataccagatggatattccatctgcctcatttaacaccctaggtatgattttagcagggaatatagaagagtagagaaatggtgcgtgttagaaatcccatagaaaggagtttcatatggtattagagaaaggatgtgtccataccctcatctgcttagcgaagtgtctcaggcatccattgtgtattaatgtgttaagcatggatatgattcctgacctaagcaaccaagaatgaggggcactttgctcaggagccgggaggaaaacaacaagcctgtaaacaaaattctgtttgtttcagaaataagatgctgctgtgtcctctctccccgctggccagctctgtgtccactctccccgctggccagctctgtgtcctctctccccgctggccagctctgtgtgcactctccccgctggccagctcagtgtccactctccccgctggccagctcagtgtccactctccccgctggccagctctgtgtcctctctccccgctggccagctcagtgtccactctccccgctggccagctctgtgtcctctctccccgctggccagctcagtgtccactctccccgctggccagctcagtgtccactctccccgctggccagctctgtgtccactctccccgctggccagctcagtgtccactctccccgctggccagctctgtgtcctctctccccgctggccagttctgtgtccactctccccgctggccagctctgtgttcactctccctgatggcagctttgtagccacctactattctctgctgggaactactgtctcacagtcacctctctttctctttcaggcattttctcggggcttctcaaagaacatgaagcttgaagctgtgaaccctgtgaatccaggagaggtgtgcgtggccactgtggtcagtgtgaaagggcggttgttatggctccatttagaaggtatgtgcaatcagctgctgtttagaagaacttgggggtactctctagagggtggggtagaaaagaattcagcactctcataaataccccctggttacccttctatttaaacataccttaaattattcagtgttcttaaataagtgaaactaatcaaatacaaattcattccaaggcgctcatcttaactaataatttcatgaaatgagatgctggtgagataattatgtttggaacacactggtctttttacatctatgattataaaagctaatgttgcaattaaattaatatgagtcactaaaaatggtatttgaggtcttggtcattatgagaacaaaatgatatatttgcattttaatgtgggcatacccttcactttggtttcttctattggatgttttatttttcctcaaaataacaatggaagaatggtttctctctccgaataaaattagccttttttccttttctttcaatgatgttgagacagttctttacagatactatttatgttagaatattcagaacactcagagaaatgtattttgtgactaaaatattttaggcttaggtagaaccttgtgttttcttgtgttgcattttgatttagacaatattaaaatagattgtctcaatggttttttcccatcttttcataacataatggtagaattcagatgtttgatgcatattcaaaacaataagaactgatgaggttacaaaaaatgtctagatttccgggtatgtgcatagcttacatcttatgccatgtgcctgtcactacttatcttagttacttttctattactttgataaaacaccctgaccaagaaaagataaaaagaaagcattaagttgggcatgtgacttcaggaggctagactccatgataatggagctaaggcagcagcaggaacagcagagacttcgcatcctggcccacagccatgaggaaacactcggaatagcgaccgtcatttgaaacctcaaagcctgctcccagtgacacacttcttccaacaggccacaccccctaatcctttccaaacagttccaccatctggggaccatgaacttacgagggaggttctccttcaaaccagagcactgttgaaaaagaacgtgtagaagaaatggggtagacttggcactagtatcatgtgatccttatttcctgcgcaaacaagtctgaagagtacgtggtaggttctcagactaatttgtagactcataaaaatagtcaagtagactggaagatgggagacctgatcaccttacatgtcatcatgtcattaattttcagataataatgtaaacattgctgtaggtcaggtgtcaaaatccggctgaagttaagtgactctgagaatgcttttgcctaatggattcctagcgcgcagcttctacttcaaaacaaagttataggcaaaatggcgacacttttgttcttacaaaggggacacctttggttttgttgctacttgtagactcagttgctgttacttttggagtcacgaggtcactctggtgaggttttatacctcgcttctgtctacgtgtactgagctccattaatgagactgatgctccctttgtattagctgccaaacagaaatggcgactttagaagcctgtgcgtcctctttcttatttagcaaattatggttgagattctgtgcagtcattatttatttagcagtttctcctttcagtatgctttgcagctgttaattacctaacacaaacagcagtacgcaggtcctgattttatagctggggaaaccagcgaagccattaagatctatccggggttcattttcccgtgcttggcattttcttgtgcttaattcactagacgctgcagctttctgtttcttgaaaaagagagatgagcaacatttaatgcacatttaacatttttgaccataccttttcccccctgatttcctcaagatacaaattttggattttataggggaaaaaaaacctatctaaaacatctaaaactccacttcatgtccagtgttgtttctttttgtttttgttttgttttgttttttttttttacatttacattattttgtgtaataatgaaaactaagaaacaaaaattaagggaaaaagtatacatcttccagacctaatttatatttttacaaagtgctcttaaactattagttgaatatttcccaatgactgttaagtatactatagagtcattggtgaaaatcatgccgcattttcattatttaaaagatataaatatgcccatgtgaaaaaccattgcaaagtgagctatcgtatcagcactgggaaggcagtgataggtggatcccaggggcgcactggccagtgagtccacatacattgctgagcttcaggttcagcagggagaccttgcaaggtgaatggtgattaagtaagacacccaacagtgtcctctggcctctctgtgtgcttatgtatgtgtatgtgcacaagcaggagtgtgtacacaaatacacatagcatatattaaactccagaccatcttgattttgcttgaattttacttattttgttttgtttggactttgggcttagagatcctttaaaagttgtcaccttctaaagtgacaacgcagtggcaccaaatttctctccatattatatttttatctacagatatcatccctgttctcagtccataggatagaatgttaggacatcattatggtcactttgaggctattaaattactttataagataatgattattctgattacaggccatttatctgagaatttaaatttacaaaagactttacaacaattttattagttattttaatgcattaaatcaatctgaagtcttttcagtgcatggctgattgaccacttttaggtaattaaaatgatcctttctagttaatatttgactccttaggaagccagatcatttttaagtaccttttagaaggtcttttgttaagaagagttcaatgattaaaatatatgagattaacgtaatatttttagttcacactgggaaaagattctagtttttataaaccactgactagaagggagatgcattataataggcctttgtgtctggccatgcatgctctactgtttttctcatcttgttattccaatgtaggtaatcctctgtaaagctctgaacaatatctgcagacagtcccatactttgatttttggtgtgtctagtacagccgctgtgaggtggaccacaagctcatcgatcagtttcctcatcaatgacagaacccaatccctgatcactttcttgggcagcaaatatggcctggtgtttcacctgttttcctggctctgttgtccttaagtgaggtcattttgttacttccttggcttctcttgtgcttacccagaatcctttttttggatactttatgaaatacaagtttcctgtctcttatccaaaacacagagtacagactttagtggtttttattagttgtttgtacatgggatccaaatccaagccagaaatcacatcacctaactctttttctgtctctgtctctgtttctgtctctgtcttggtctgcccccccccccctctctctctctctctctctctctctctctctctcacacacacacacacacacacacacacacacacacacacacatcgggggcctgaaactaatttaatgtatcatctttaacagactgcacaaaataaccaaatttcataccagttcctttatgatgagtcacaatggcactcagaaagtttaacattttgcacttgaggaactctggttagagatggcccatctgtatatccatatattaaacttgatttcatatatcaagagagacacactggtgttcatcccgcatgtccagtgataaatgcattggcttcttgaaacttaaagtaccctagctttgtgtctggagtagtaccaaagagagattttttagttggaaaaggtattgtgcctttggggaaaaatggcaaaataagcataatgtaatttttagaagtctctgggcatgtgatattaaatttattcatatcactatgcaaaatcaccagcaaacatttccagaactttcttatcttcaaaatggaaacattgttcccattgaactcaactggatttcacagctgttcttagcagcagctgttctactaactgactttatgaaactcctagaaagtcccatgaggggagttatacagtatatgtctaaaattagttgtgtgcaggatttactactaataatgctctcatgtgctgtcctttggactttatatgtgtagcagtgatcttggacatttcctttcccgtgtttgattctaggtacccagtccttagtaagggcttatagcagattggttgagattggccccagaatcttatctagacctagaatttctgactctataaagatcaggccacttgaattaaagattaagaaagtgaatctggccttgaaggaatcgttatactactacgactactacgactactacgactactaccacttacttctcctcttgctcctccttctcttctctttttcctcctcctcctctttcttcttcttctcccttcttctcccttcttcttcttcttcttcttcttcttcttcttcttcttcttcttcttcttcttcttcttcttcttcttcttnnnnnnnnnnnnnnnnnnnnnnnnnnnnnnnnnnnnnnnnnnnnnnnnnnnnnnnnnnnnnnnnnnnnnnnnnnnnnnnnnnnnnnnnnnnnnnnnnnnnnnnnnnnnnnnnnnnnnnnnnnnnnnnnnnnnnnnnnnnnnnnnnnnnnnnnnnnnnnccacctccaccatcaccacaacaacaactttttttgtgtgttctcattgagactgggacctatatttcccaggttggtcttgaacttgctgtgtagccaatgataacataaaactcctgatctttctacttcaacttctaaatgtttgtatttcaggcatgagctaccatgcctagccttttaaacatattcctgacatgtcaaggttcttgtgtggaccaaagatattctgctaataatatggaggccttcaaagggaaagagacacaggcttgatatgcctcccctgatatacctggattaagaaatgaacactttggtggaatttttagggtcacttatatatactatcatatcatctgcaaaaagtgatattttgacttcctcctttccaatttgtatccccttgatctccttttgttgtcgaattgctctggctaatacttcaagtactatgttgaaaaggtagggagaaagtggacagccttgtctagtccctgattttagtgggattgcttccagcttctctccatttactttgatgttggctactggtttggtgtagattgcttttatcatgtttaggtatgggccttgaattcctgatctttccagaacttttatcatgaatgggtgttggatcttgtcaaatgctttttctgcatccaacgagatgatcatgtggtttttgtctttgagtttgtttatatagtggattacattgatggattttcgtatattaaaccatccctgcattcctggaataaaacctacttggtcaggatggatgattgctttaatgtgttcctggattcggttagcgagaattttattgaggatttttgcatcgatattcataagagaaattggtctgaagttctctatctttgttggatctttctgtggtttaggtatcagagtaatagtggcttagaaagtacccaaggagctaaagggatctgcaaccctataggttgatcaacattatgaactaaccagtaccccggagctcttgactctagctgcatatgtatcaaaagatggcctagtcggccatcactggaaagagaggcccattggacacacaaactttatatgccccagaacaggggaacgccagggccaaaaagggggaatgggcgggtaggggagtgggggtgggtgggtatgggggacttttggtatagcattggaaatgtaaatgagctaaatacctaataaaaaatggaaaaaaaaaaagaaatgaacacttgtgaggtgctggctgtaaatctcatgttttactacacttattagctgcttcgtcgtcgttgtcttttctgtaccttatattacttgtcttgaaaatagggatgggacagtccctgtctctcaggattactggggactaaacccatggaaaagaatctggcttgtagtaagggcaatgaatgtcttcccttgtggaatgtggttccttctgagtgcacatacattcacgaacaggtacacataggcatgttttcatacacaagcacgtgcacacgcacacgcacacgcacacgcacacacacacacacacacacacacacacacacacacacaccttcggttacattgttaccattttctttcagactctgtgtttcctctgactttaatcttttcttctggctggtcaccattcggttttctctttattcctgaggagtttggctccaagactgacaaagagatgctccaaaagctcctttgttgcttggtatcccataggggataaacactgagggtcacagccagggctccatccatcacttggttctggatgctttcctctcaccttacgttttctcgtttcatcgcatcctcaagcctgtccacatttgccatgccctttgactttgactaagaacattaaccaaagagaagttatccccttaaacaccccttacctttattcccatcccagcttttaaggaagatggaaaaggttgctccaagtctattactgaaggaaatgaaaaaccatctacttgtatcatggttggttcagaggcatttctccccttgcatccctcttgccggtggatccttataacacctccactttctaattcacctgcacttcctctctcttgtggcttgttggaagccacaagagagtttgggaccctgaaggaattgtgtccctctctgaggtgcctagctaagccatcttcctgtgctatcctgatgtcttgagtttgaacaagtcagcatctctgttgaagtagccggtgtcattgactagatttagctgctatgcaaagttctggcaatcacacaggccaagtcttgggatctgagatgtgaggacaagggctttgggagatgggaaatcatctctaaggtccctacccgagtcccacatactcagatgcttctaagttttcttcaggactagggaagttcttttagcaatggttccattgtttttttgtttttttgttttcttttttggtatgttaattggaatgttaatttgaccttactggtaacccagtgtttatatacaaatccttctttccttattggctgtgctgtgcttttgttattccaggagttgtagaagctatgtttgtaaagtagaacatttacagaaaatgaggaaaatacctaattaaaaaaaagagaaaaaaaaaaagaaaaggtggggtactttgattgggggaaggaaagggaagaaggagagaaaaattaggatgtttgaaaatgtgtaaggaataatatttttatttacctaaaactacatataatacaaataaattaagtatatatagttacatatataatttatacatataatacatatatacatatatacaatatatgtatacaaatatatgtactactcaagctactaaaaagaatgaatttatgaaattcctaggcaaatgggtggacctggagggcatcatcctgagtgaggtaacccaatcacaaaggaactcacacaatatgtactcacttataagtggatattagcccagaaacttaggatacccaagatataagatacaatttgctaaacacatgaaactcaagaagaatgaagactgaagtgtggacactatgcccctccttagaattgggaacaaaacacccatggaaggagttacagagacaaagtttggagctgagacgaaaggatggaccatctagagactgccatatccggggatccatcccataatcagcttccaaatgctgacaccattgcacacactagcaagattatgctgaaaggacccagatatagctgtctcttgtgagactatgtcggggcctagcaaacacagaagtggatgctcacagtcagctattggatggatcacagggctcccaatggaggagctaaagaaagtacccaaggagctaaagggatctgcaaccctataggtggaataacattatgaactaaccagtacccctgagctcttgactctagctgcatatgtatcaaaaaatggcctagtcagccatcactggaaagagaggcccagtggactttatatgccccagtacaggggaatgccagggccaagaagtgggagtgggtgggtaggggagtgggggggggagggtatgagggacttttgggatagcattagaaatgtaaatgaggaaaatacctaataaaaatattttaaaaaacaaacaaacaaacaaacaaaaaaaagaaaatgcaaggctatcttgggttagattctcactcttgctcttggattccctcctcctatgcattttgttcttttattgtgggataccaccattggtatttcacagtgcaacacacacacacacaatctcctcaccccttgaaaacagaccagtgtgtgcattatactcatggtactgcaccctgtcttttcttacctcacgatacatattggggatcattacagtaagtatttaatagctgcagaatgttccatcacttgaatataccctacatgatctgaatattttcccatggagggagtcttctgctttctgatggatttttagatgtaccttctagattagcatgagcaagtcaagtggtactgatgggtctcagcttagacaaaggcagaccatgagtatggtcctatctacaaggatttttttaaactttataagtatttgtattaattcttcaagaatttcatacagcatgttttaattttatacagcatattttgcatacatatttttaaaaagatttatttattattattcataactacactgtagttgtcttcagatacgccagaagagggcatcagatctcatcatgggtggttgtgagccaccatgtggttgctaggattcgaacttaaaacctttggtagagcagtcagtgcttttagccgctgagccatctcaccagccctttgcttacatattaagtgatagatattgcattgactctttgatgaaacctctagtgttgtttctataatcccaggagtcctagatcaaacaaggaagagtcctggacacatgcatcatttttctaagctgttaggactccagtcttggaaatattagcttttccttaaaatgttatctggaatcttggcagacatatctagatatatgctactcacagcaatcgataaggttgaaataaggaaatatgaaattggtactcaccactcagaatggagtttacaggactggcatcaggagaagtgttcctgggtgatacccacattgcttacttgtacacgggttttcttttccctccctcccttcatctctccctgccatcctccctgccaccctccttccttggtgtagtatatgtacatttgggatatgtacagaatccaacttccttccatttatcttgttcacagcctgtgtgtccccatgcagaagccattgaggaacttcaggtgtcttcctctgctggttcccactttatttccttgagtatcttcccagtaccttcagttccttcacagtatctgaagcctgccattttgactaggctggctgtccagtaagctgttaagatccacctctctgtactgcccaccgcccacacacggctagagttaacattatgcacaactatgcccaagaaccaaacttaggcccagagtggtatacactctgacttcccaagccagctttccagccgggataacccacgtttccatcctatcttatttcagagatgccttcagaggggtgaaagatttggggtggaaggaaagcaggagtctcagtttcttgaggggaaaaagtagttagcatctcttagctcatggttgtttacttgggtaggagctgtgttgaaagaaccttaaagcatggtgaaggcagctgtgacaacacattaatgtatacattatacagagtgtatataatcaagcactaatatggggtaatacttgagccaacagaacatttgggggcggatctttaagcagtcaagttcactctgtgagtcctttggaagtactgcttttaataaccttgaagatctttatggctaaacacaatctaaaagtaaagatatttctatttctggtggataaatgtaacctgtgggaaaatgattgagacacaaagaaacaaatactatttttatgagcccaaagtggaggaaatgattttgtgctttggggaacatcctcaagactcttttgtctaaagtgtgtgtgtgtgtgtgtgtgtgtgtgtgtgtgtgtgtgtgtgtgtgtgtgttcaggtgcacatgtgtccctgtgcacacagaggccagaggacaaatttaactatagctccccaggttctgtccagcttgatctttgaaacagagtctctcattgggagatgggaacttagggatctgcctgtttctgcctccctcaaactgagatgacaaacatgtgccatgctgcctggtttaaaaacaaagccaaacaaaagcaacaagcacacagacataaggctttgggatttgtgattgcaaagcaagcgcttcattgactgacccatctccctccaaaatggtttttattcaccagtttattgacttagtagtaatttgagagcttttgcttactaaagtgcacactcagttttcaccatattttcctaaggatggagaaggaaggtcatggtgcagttggcactgctttgtgttggggacttggtgtttggcttgttgccatttgggggaggcaggtcaggggaggatctgattgaaaattctgtaggtactgtgtgataacgtggatatctgatgagggatacagggatttttatcttaaatatcattgaagacaatgaggctaagtagattcaaagggccactagctgttaatagacctcttatcttttcttttggttctttgagaatttgtccatcgaaatgttgttttgttttgttttgttttgttttgttgagaactattggttccttgtggaatttccttctgctaactagtgggatgctgtccacctttgttctctctgtagctcagggtgctcgatgcttcagctctcattgtaggtttttcatcttttctcaacatttcccagctgtgatgatggtttgccacagggcacagttgcaattacgaaacaggatgtggtgttagaagtttttcatgaataaaagaagatttctttatagaaaagtgttttgtgtgacatagcatctctcggtcaaaccgagctgaaaatgaatgagtctagggcctgggtggtgggtcagttggtaaggcaggcatttgccacaaaggcacaaaaacctttgttccatccccccaaaagaacctgagtgtcgtggtatgtgcatatggcaaagcagagacagttgggtccctgaattgagatacactggccagccaacctagcctgcttaggattttagggtcagagaccctatctcaaaaactaaggtgtgtgtggtggtggaatgacctaggaggttgacctctagtttccacacagtgcactcatacctgcacatatatgcactgcacatacacaaacacatacatgtatatacacatatacaaaatggaagtgctccagtcaaagctgagaggcaaatctctcagcagattgccttacctctcagttcctaaatagtacaatccccgtggttgtagcttttggctgtaatgtttgcttttatttcgttaacagttactctttgcttggtgtagaacgaattctcccgtgctggtttacaagctgtagcacatgtctttaatttcatagctactcttaggaaaggggacatctggtccctttttgaacatatctggctctgatccagtttttcctagcatcctctccctcctcatttttaagctgacatatatgtttcctccaaacttcgattttattcgagctatcttagattctctaaatattttgtacccgttttaagactatagactctctaagccatcccttatactgttatcaatttgtaaaccattcccagaagtgtatttctcagtcttggggatgttgtgctgtatcgtgtgtgtgtttcttcctgatacccatcacgttggtttctccccatgtaggtctggagaccccaatgccagatatcatcgtggacatggactccatggatatcttccctgtgggctggtgtgaggccaattcttaccctctgaccacaccatataaagcatcctgtaagtgtttcccagtggaaagagatttgataaacacctcgtgtgcatgctcacagtgactgaacgggctattgggtacgggaggttgtgacactaagggtttcaggtgttctgaggcatgcctgtattggtgcctcaattgttccttaaatgctgacatcagatggacatttggacatccttctaggtgacagtaagggggcaatcacagtgcgatccattgttttcattgagaaagcttaggttagacatcatgaggttgttgttgttattgttttcttttctctgttttttgagaaagggtctcactgtgtaggcccttgtcgggctcttgctgacttctgtcttccaaatgctgggactgaaggcatgggctgacatgatgtttttctattattattttatgggggactctagctcttttcatgtagtttcctctaaaagaatccacagagccagagaatcagctcagtaggtgactattgctgtgcatgtatgaggaccaaactccccacagccagataagaagctaggcatgcctctacctgccggcaactccagcattagcaatcggagataggtagatcccaggagcttgcttgctggccagccagcctagcagaataggcgagcttcaggttcagtgagagatgttggtataaaacaaaatgtggggaggaatagaggcaggcacttgatgtcttgttctggcctacacatacacatgtgctctggcaccacacacacatcccccaaacagaaatcaaggaatcaaacgtgatctcagcaatttactgacctaaatgctcttagcatcaatgactaaccataactgagcaatgtttaaatttaacaatataggacctcatattttttgatgcccccaataccaaattatatcatttctgctaacttaccaacacgacaggtcctcagtccataaccagatatctcgaatcagacatcttgggggtggagactcaacaacctctgttttcctaagctccctccatggagcatgcgaagaacatccatgcctgcagtttcagacttggacacaggtctgttactaaccacttacctcatgttatgtagttaaattacaacacatcgcatccatatacacaaagcagccataccatgacgctgtaggtccttcctcctggaaactccatggcttaagaatcttcagaccaagtgtatctttgcattgatttcttcttactacttaaatagtatgagtccttaaagataacaggcctcacgttttgttaaagacatgattgatatttgacttaagggagagggctcagtggtgaagcccttccctgcaagcatgaagacccgagttcggatcccagaacctatggaaagccagattcagtggtgtaggcttgtaatcccagtgtttctgtgatgaggtggggggtggagacaggggaatacccaggagctcacaggccagcagcaaggtgttagtagcagtgaagaggagaccctatctcaataaggcagatagaaataagaactgacatttgacattgtcctctgatttccacatgtgtgaatacacacacacacacacacacacacacacacacacacacacacaccgcacactttttctaaaagctcctttttaaagagatggtaattgtagtgttatccttagagagcgcttgggtcagccttacttcctcctagcgccctgttctgtactttacttctgggcatccttaggtctctgctgtaaataaagtttcttcagaggtggtttctcttctttgatgcccacagatttaagagcatccttggcattcacttggagaagtctagaacttcccctattcctgactggcggctgtgttgtcttaacaggttaaaaatatggctccttgtaaatgggtgataggaagagtgttcctgaggtcataataattattccaccctcgagtttttggacatgactaactagatcgtgtggactgcatgatgtcttccctggggtccattacagccttgtttttactatcccttagacaaagcctcttgccacacagccttccatcccttccttcctacagacaggagaaactgcaaagtcttccagttcctatggagaaaagtcacatgttggttaaagtgaatgcagtattttgtttcctaagttaagtttagtatggtaaggtcctaataaccacagccaccacttagaagttaggagtccttcctaatttgggggcatagtcaagccctttgtatgcatgttctttttcaaaatttcatgcatgtatgtactgcatgttgagtttattacctctttatcccatcttcccttcattcttgccttgccttcccactgccctgtttgtttccctagttcatttctacttttgtctgatatatgcatacatggtttcatgtaactataaaatctataaagtacaaacgagagaaaacaaatagcattgtcttctaaagatgggcttcattcacttaatatgatcatgtccagctgcacacagctttctgaaaacaataacaagtttattcttctttatggctggaaaaagttctatttggtttctatgcctcctgttccttacctgttcccccactgatggacagctaggttacttccatatcttagctattgaaaacctaatgcactaaaccgtgatgtgagcatgctagcactttctcagttttgcattttgctcccaagtctgctgtccttagtttcttaccgtggcattgcacaaccaacagaaactgttgtacacctttttttccacattggagcctatagaagtttattctttgtattgcagtgactaattatgagtgacagtctattgagttttcctcacatcaggttttacagttagtcttcttgaagatttattttaaatgtgtgtgtctgtatgtatctatgtgtgaacaggcatacatgtgagtgaccatgtcttcagctcctctgttagtatttatttccaataaatgtttatcacctggataaaaaggtagaccacagctttgtctgctagcagtcttgactcagataactctgtatctgctaacatgaacattttccccccaagacagtctcacagtatagctttgactgttctggatctcactctgtaggaccagactgggctcaaactcacagagatccacctgcctctggctccctagttctgggattaaaggtgtgcaccacacttcccagcttagcacttgtttatgcgaatctaatttctacaactattagtgttgggtaggataacagttcaagagttactgaactctttttacagaacgatgtgtgcttaagacatgaatgcaagaactggaattgggtagatgctcagtggttacggttgtatactatttttgtagagaccctaatcctctgattggtacccagggctcacattatacagctggaaaccacctggacctccagctccaggggatctgacagccttggctggactcacatacacatagccacacttagacacactgcatagtgaaaaataaaacaagtctttaaagatattacagagagtgttcttaccccccctatcattatttgctggttttatttgaaggtttgagcggatacattgctagctgtctcttctctttcaatgaggctgacttggagctgtattatcttagcagtatattccaccttatcagaatttctgtggagtttgctacaattgatcttaatgtgtgtttatgtgcagtgtaatgtgtgctctctttatcttccttttgaaaaagtaccctttaaaataaaacaaccattgtagtgataagattatatagacgtacttacatctttttcttgtttgataaaatcacatctattttatgctaggagatgctatgtatatttgttgtttgacttcgacagctttttcgttttaagaatgaacacaaggatttatcttaataaaaaataataatgactttgccataaagactgtcttcattatttagtggcttaagagacatattagaatggtccctgtcctattcagtagtaatgcgggcctggggaagcaggtctgatgagagagtatgtacctaggtagatactttctccacctatttagcatccctggaagcctggctcagtcccagaactacttaggctgggtgtagtggagcacccatgtaatcccaacactctgaaggtagatcctggaggatcaggcatacaaggttgtcttcacctacatatccagttctaggctgcatgagaccccacctctaaataaatcaaacaggttatacttttacactaggccatttaaaaaggattaaacttactaacagtgtcctattctttttcttttcccatttacagccaaaagcaagagaaagactgtccatttcaagatggaaaaacagtatgtatttcccccacttcattttcttctcattaagtgcatggttagctacaaagggcctgagaggttttcttggggcatcagctagcgagcagcttaccagctctgggacggctgttcctcctggtgcagtcatgacgtgcagaattcagagcccactctcaaagccttctacagacccatggttatttctcatttttattttcacatggatggacatgactgcgtctggtgctgagtctctgtggccctgtgtgacaagtgtagttcacagatgggtgatctgttttgctgacacctggaggcaaaagtcctcagtgtcatctccagtgcccagacacccatctggctgaacttgagcagtggcttttgtccttcatgtctttttttttttttccattttttattaggtatttaactcatttacatttccaatgctataccaaaagtcccccatatccacccacccccactcccctgcccacccactccccctttttggccctggtattcccctgtactggggcatataaagtttgcaagtccaatgggcctctctttccagtgatggccgactaggccatcttttgatatatatgcagctagagtcaagagctccggggtactggttagctcataatgttgttccacctatagggttgcagatccctttagctccttggctactttctctagctcctccattgggagccctatgatccatccattagctgactgtgagcatccacttctgtgtttgctgggccccggcatagtctcacaagagacagctacatctgcgtcctttcaataaaatcttgctagtgtatgcaatggtgtcagcgtttggatgctgattatggggtggatccctggctatggcagtctctacatggtccatcctttcatctcagctccaaactccgtctctgtaactccttccatgggtgttttgttcccaaatctaaggaggggcatagtgtacacacttcagtcttcattctccttgagtttcatgtgtttagcaaattatatcttatatcttgggtatcctaggtttggggctaatatccacttatcagtgaatacatattgtgtgagtttctttgtgaatgtgttacctcactcaggatgatgccctccaggtccatccatttggctaggaatttcataaattcattctttttaatagctgagtagtactccattgtgtagatgtaccacattttctgtatccattcctctgttgaggggcatctaggttctttccagcttctggctattataaataaggctgctatgaacatagtggagcatgtgtccttcttacctgttggggcatcttctggatatatgcccaggagaggtattgctggatcctccggtagtactatgtccagatttctgaggaaccgccagactgatttccagagtggttgtacaagcctgcactcccaccaacaatggaggagtgttcctctttctccacatcctcgccagcatctgctgtcacctgaatttttgatcttagccattctgactggtgtgaggtggaatctcagggttgttttgatttgcatttccctgatgattaaggatgttgaacattttttcaagtgcttctctgccattcggtattcctcaggtgagaattctttgttcagttctgagccccattttttaatggggttatttgattttctgaagtccaccttcttgagttctttatatatgttggatattagtcccctatctgatttaggataggtaaagatcctttcccaatctgttggtggtctttttgtcttattgacggtgtcttttgccttgcagaaactttggagtttcattaggtcccatttgtcgattcttgatcttacagcacaagccattgctgttctgttcaggaatttttcccctgtgcccatatcttcaaggcttttccccagtttctcctctataagtttnnnnnnnnnnnnnnnnnnnnccagttgtgccagcaccaattgttgaaaatgctgtctttctcccactggatggttttagctcccttgtcgaagatcaagtgaccataggtgtgtgggttcatttctggatcttcaattctattccattggtctacttgtctgtctctataccagtaccatgcagtttttatcacaattgctctgtagtaaagctttaggtctggcatggtgattccgccagaagttcttttatccttgagaagactttttgctatcctaggttttttgttattccagacaaatttgcaaattgctccttccaattcgttgaagaattgagttggaattttgatggggattgcattgaatctgtagattgcttttggcaagatagccatttttacaatgttgatcctgccaatccatgagcatgggagatctttccatcttctgagatcttctttaatttctttcttcagagatttgaagtttttatcatacagatctttcacctccttagttagagtcacgccaagatattttatattatttgtgactattgagaagggtgttgtttccctaatttctttctcagcctgtttattctttgtatagagaaaggccattgacttgtttgagtttattttatatccagctacttcaccgaagctgtttatcaggtttaggagttctctggtagaatttttagggtcacttatatatactatcatatcatctgcaaaaagtgatattttgacttcctcttttccaatttgtatccccttgatctccttttgttgtcgaattgctctggctaatacttcaagtactatgttgaaaaggtagggagaaagtgggcagccttgtctagtccctgattttagtgggattgcttccagcttctctccatttactttgatgttggctactggtttgctgtagattgcttttatcatgtttaggtatgggccttgaattcctgatctttccaaaacttttatcatgaatgggtgttggatcttgtcaaatgctttttctgcatctaacgagatgatcatgtggtttttgtctttgagtttgtttatataatggattacattgatggattttcgtatattaaaccatccctgcatccctggaataaaacctacttggtcaggatggatgattgctttaatgtgttcttggatttggttagcgagaattttattgaggatttttgcatcgatattcataagagaaattggtctgaagttctctatctttgttggatctttctgtggtttaggtatcagagtaatagtggcttcataaaatgagttgggtagagtaccttctacttctattttgtgaaatagtttgtgcagaattggaattagatcttctttgaaggtctgatagaactctgcactaaacccatctggtcctgggctttttttggttgggagactattaataactgcttctatttctttaggtgatatgggactgtttagatggtcaacttgatcctgattcaactttggtacctggtatctgtccagaaatttgtccatttcgtccaggttttccagttttgttgagtatagccttttgtagaaggatctgatggtgttttggatttcttcaggatctgttgttatgtctcccttttcatttctgattttgttaattaggattttgtccctgtgccctttagtgagtctagctaagggtttatctatcttgttgattttctcaaagaaccaactcctcgtttggttaattctttgaatagttcttcttgtttccacttggttgatttcacccctgagtttgattatttcctgccgtctactcctcttgggtgaatttgcttcctttttttctagggcttttagatgtgttgtcaagctgctagtatgtgctgtctcccgtttcttcttggaggcactcagcgctatgagtttccctcttagaaatgctttcattgtgtcccataggtttgggtacgttgtggcttcattttcattaaactctaaaaagtctttaatttctttctttattccttccttgaccaaggtatcattgagaagagtgttattcagtttccacgtgaatgttggctttccattatttatgttgttattgaagatcagtcttaggccatggtggtctgataggatacatgggacaatttcaatatttttgtatctattgagacctgttttgtgaccaattatatggtcaattttggagaaggtcccgtgaggtgctgagaagaaggtatatccttttgttttaggataaaatgttctgtagatatctgccaggtccatttgtttcataacttctgttagtttcactgtgtccctgtttagtttctgtttccacgatctgtcctttgaagaaagtggtgtgttgaagtctcccactattattgtgtgaggtgcaatgtatgctttgagctttactaaagtgtctctaatgaatgtggctgcccttgcatttggtgcgtagatattcagaattgagagttcctcttggaggattttacctttgatgagtatgaagtgtccctccttgtcttttttgataactttgggttggaagtcgattttatccgatattaaaatggctactccagcttgtttcttcagtccatttgcttggaaaattgttttccagcctttcactctgaggtagtgtctgtctttttccctgagatgggtttcctgtaagcagaagaatgttgggtcctgtttgtgtagccagtctgttagtctatgtctttttattggggaattgagtccattgatattaagagatattaaggaaaagtaattgttgctcccttttatttttgttgttagagttggcattctgttcttgtggctgtcttctttttggtttgttgaatgattactttcttggttgttctagggcgtgatttccgtccttgtattgcttcttttctgttattatcctttgaagggctggattcgtggaaagatattgtgtgaacttggttttgtcgtggaatactttggtttctccatctatggtaattgagagtttggccgggtatagtagcctgggctggcatttgtgttctcttagtgtctgtataacatctgtccaggctcttctggctttcatagtctctggtgaaaagtctggtgtaattctgataggccttcctttatatgttacttgacctttctcccttactgcttttaatattctatctttatttagtgcatttgttgttctgattattatgtgtcgggaggaatttcttttctggtccagtctatttggagttctgtatgcttcttgtatgatcatgggcatctctttttttatgtttgggaagttttcttctattattttgttgaagatattagctggccctttaagttgaaaatcttcattctcatcaattcctattatccgtaggtttggtcttctcattgtgtcctggattacctggatgttttgagttaggatccttttgcattttgtattttctttgactgttgtgtcgatgttctctatggaatcttctgcacctgagattctctcttccatttcttgtattctgttgctgatgctcgcatctatggttccagatctctttcctagggtttctatctccagcgttgcctcgctttgggttttctttattgggtctacttccccttttagttctagtatggttttgttcatttccatcacctgtttggctgtgttttcctgcttttctttaagagcctgtaactctttagcagtgctctcctgtaaatctttaagtgacttatgaaagtccttcttgatgtcctctatcatcatcatgagaaatgtttttaaatctgggtctagattttcggttgtgttggggtgcccaggactaggtggggtgggagtgctgcgttctgatgatggtgagtggtcttgatttctgctagtaggattcttacgtttgcctttcgccatctggtaatctctgaagctagctgttttagttgtcactgttaagagcttgttcttcaggtgactctgttagcctctatgagcagacctggagggtagcactctccttagtttcagtgggcagagtattctctgcaggcaagctctcttcttgcaaggcaggtacccagatatctggtgttcgaaccagactcctggcagaagttgtgttccactcactagaggtcttaggatcacgtgtggaatcctgtgtgggcccttgcgggtgtcaggcgactcagctggcaaggtagccggggctcgagtggagtggaaggggtttgtgccccagatcaagcccgggtagcctgcttccctatgtaccgcagtctcaagttccacgcgattggattggggtaggcgctgtgttccactcaccagaggtcttagggtcccgtggggagtcccgtgtgggcccttgcgggtgttgggcaagactctgctgtcaaggtagcccggggctcgagtctcgagtcgagcggaagggacttgtgccccagatcaggcccgggtagcctgcttccctatgtaccgcagtctcgagttccgcgcgattggattggggcaggcactgtgatccactcaccagaggtcttagggtcccgtggggagtcctgtgtagacccttgcgggtgttgggcaagactctgctggcaaggtagcccggggctcgagtcacgagtcgagcggaagggacttgtgccccagatcaggcccgggtagcctgcttccctatgtaccgcagtctcaagttccgcgcgattggattggggcaggcactgtgatccactcaccagaggtcttagggtcccgtggggagtcccgtgtggacccttgcgggtgttgggcaagactctgctgtcaaggtagcccggggctcgagtctcgagtcgagcggaagggacttgtgccccagatcaggcccgggtagcctgcttccctatgtaccgcagtctcgagttccgcgcgattggattggggcaggcactgtgatccactcaccagaggtcttagggtcccgtggggagtcctgtgtggacccttgcgggtgttgggcaagactctgctggcaaggtagcccggggctcgagtcacgagtcgagcggaagggacttgtgccccagatcaggcccgggtagcctgcttccctatgtaccgcagtctcgagttccgcgcgattggattggggcaggcactgtgatccactcaccagaggtcttagggtcccgtggggagtcccgtgtggacccttgcgggtgttgggcaagactctgctggcaaggtagcccggggctcgagtctcgagtcgagcggaagggctgtccttcatgtcttaacattctcatttaaaaacaataaatattgaggtttttttttttaataccaaatttggtttcaagtgtaaaaaaaatgttgcctttcctttttgatgtagatataggttgcagtttgatggggggggggaatggaggttttaggttaaagtgttgtacatgagggcaggatgtgtttgaaaagttggagcttctggtgagccttttgcacattataaaatatttaaaacacatccaaatgttccttccatctgaagggattgtgttttcttaaggaaacaaaaacatatggtagtaaagctaactgaaaacagcacctttgtgtgcattcaggcttaaatctaaataaaagaaatgaaacagatacttgaggcagtcactgaatgaggataatgacttggggtgttttatgtagtcatcccggaccaccacggggcaggcttgtgtcctaactccagtttatctatgtagcatgatgtagttagatcagcagtaagctcttgttagtgagtcctagcttgcagttcaaggattaatgattctcacacctcatacagattgctgggccccatgagcatgatttctggtttaggatatctggggtttaatctgagaatctgtttccctacatattccagctgatgccagttctgtaggcttaagaaaccacagtttaatatccactgctcgagagggtgcagccctcccccatcttaagatatctgttgatggtttatttgatatttgggtcaaatttcaaaaactgcagttgctattcggctaccccaggtgaacacctgtgagtcccagatttcctatattctccttacaccactctttaaaaacttagatttatctatggactttttacctgacctctaaaagaacaagccagaattaaagttccaacaatcatcagtttaaagttcttcctcgtagccatctttttagtatatttgtgtctcacagaggcatagattaaagatgtccagagtcacctgaaggttgttttaattagacaattgcagtggagaagtctgacattaattatatgtcagttgaatctagaatgtaattgaagacattattccaagttcagaagaaactcattggtccagtatggccactcagaggcctgtgtgcctaggcttgttagggtcatcaagtggatttgaacacaaaatgacctccttatttggctgactgaggctatttttgtacaattggcctaccttgtaaaggctttgtcttgaattcctggcatactaattttaaatatgaagagtcctcagtgtgccaattctttcttcttaagcctgtgcccttaatagttgattttctttatccacagattattatccccagtgcctattgagaaaatacctcatgagctttgcttgctgccgccgcagatggacagtccaggtaaatactcctcatgaaagacgccatctcttccactgcatcgttgtgacggcagacgtgtgtggctatagtctctgcttctcaactttgagcccattttccttccttcctttctgatgctacacattcacagacagacatttaaaaagaacttttttgaagctaaagttgtacttcatctttactactgcttggtcagggtctgttcttgtaatcttcaagaaaagaacgggtttgatatttggccattgtaaatcagattagcatcctgcatccctgaccctggtaaagaaaaggaaaacatggagaactggtattggccattcctttcttgttatttaatcacagttccacgtgacttttggagtcatggtcttgctaggtagcccaggctagccttgacttctcaatcctcgtgcctcggcctatctagtactaggatttcaagtgtgtgtcactgtctctggcttatctattggctccattgccccagtgacttacatatatccactcttgatttactcatgctaacctcagtctgattgtgaacaatatattcgtcaacacattaagccttgcatccttgtgagacagagtcgtgagctaccattggacatcaaatgtaactataaatatgtctgcataaactggaatagctaaaatctctattctataaatagattagatgaacatttaactaaacgtctgggtaatgctaccaaatattataagtaaattcagtttgtgaggttaattttcttctttcttgtatagaacttattttttttaaaaactacaccagtttatagtctactgcagtaatattattctttttgtacattcaatataaaattcatacttcctacttactggctattaagtttaagaaagatgcctttctgaactgttaaattgccttcaaacaaatactaatgtttttgaaggaatctcactggttcagagagtagggcccttagcccaaagagggacaataatctgtattcataaacaccaagaaatgttacttaaaccagagctggttgtgcacacctgttactccagcacctgcgatgccatagcagaagagctgtgagttccacaccatctgggatgtagagttagagacccaacataccctgccggatgagtacattcaaaggataggagttcaagccatgtgagggtaattttctcttcatcataccggcaatatggaaaagtctagcaatatctagttagcaatcctcaggatctcactgtaccgttctattccagtcggagccatcaatgccaagtactgctgcccacagctgttcgtcaaccaccggtgtttctcaggcccattcctgaacaaaggaaggatttcagagctacctcagtcagtggggcctggcatgtgtgtgctggtgctcaaagaggtaagggtgtctgaactgctttaatgggggagccttacatcgtgttccgtttccaaagcagatgttcagtccctcaactcaattcagtttacttcactttcagcaaagcacatctcaactctggggatggaacactagagatttcaaggtgtcaagtgacatccctacccatgcaagactcatgatctaatcaatatgcttttcccccacatgagttagggagatatgttataatagacttcaatcaagacaggagaatgaatatatgtattcatcactcagtgctagattgtttaagtttttcaaggaagaagctaccttgggcaaacaagagggcattataaactgactggcatcttttcttttccatttccctttttgccttttaaagaaaggttttcatatataccaggctgcccttgaattccctgtctattcaacaatgacctagaattcttccgcccctccctcttccacccaaatttggcaattacattgtacaccaacacccaagtttttaatgtagtgatggtatttcacccagggcttcctggatgctaagcaaacattcagtcaaccgagatatacctccagcacaactgctatctttgctgtcttcctctacaatgcctgcctggtgcctgcactcaaacagtaatgatactctgcctgttctctgtatgctcatgaggcttgtgttgtggcttggtccaggcaaagcctaggccactcatcacctggaagttacttcccatttccttcctgtttgtggaggtgacctagagtagaggctaacctgatggatgtaagtggacattggaggttcttctactgcactggctggcccagctacaggtggtatctggtgaccccactttggactcttctagttatgttctgctcttgccctgcacagcagagtctcttcagggtctctcttaagaaaaaggacaccagtatgacttattattacttctatgccatgctggttgcttttttaaaacaaaattcagtggctacacaatccgcctccccactgacccactgtttatgaggtagcttctaagagccaggcactatctgaaatattgcatcaaaatccagtcctgttaggcttttgtctgtctgagtttccattcagctgtgaggaaattatgtgattcaaagctagataaacatagggatgggctaaagagaggggggagcacagtagtctgagagcagagggcaagggggagaggacacaactatggcaggtgacatttggcttggcagagatgagtaagtaccatctcaattgcacagcatgagctggcattcagggacgatgctggcaaatgggtcaggcctggctggaaaagaggatgctaggctgttcctaggtgtaaagatgtgtaaaagggtgtgttgtattttaagagcaaaacccaagaggctctggggttgcctggtgtttcattgtcaggtggaaccaaagagctcagggggagctgtgtgcaggtgattttctttgctattctgagcagtttggactgttgaggatttctctcactgtcatcttcatctctctctctctctctctctctctctctctctctctctctctctctcgtgtgtgtgtgtgtgtgtgtgtgtgtgtgtgtgtgtgtgtgtgtgtgtgtgtgtgatatacatgtgctttcccactctgtgggggaatgcacctgtgtattgaggccagaggccatttttttaaaagatttatttactttatgtatgtgagtacactatagctgtcttcagacaccccagaagagggcatcagatcccattacagatggttgtgagccaccatgtggttgttgggaattgaagttggaacctctgaaagagcagtcagcgctcataaccgctgtgccatctccccagcccccagaggccaattctgtgtgtttccttaagtcattctccactttactttttgagactacatctctagaattggtctaaaccacattgattcacatcatctggctggctagaatcaggaaatctgcttatctgtttgtctctactatcccagctcttgggttataatgtcagcatgcccagtaccgcccccaccccatcccctctctctgtctgtgtcctttattttaatgagtgctttgggtttcgaacatataccagtatacttgtgtagcaagcaatttattgggtaaaccagctacctaccttttttgtttaaataccatttttcctaaagagaaacgttatcaaagcagttggaggaggtttgattttccaggccattggttgtcaaaaccttctgcatacttagaaacaaatctgtattgagggactgtaaagcatttaggagaaacctgtgaaacatgaacagatctacggtgcttattcatttaggagcatttgacgggttgcctatttcttagtcaaataggctgtttcaagtcacaatcttgagtgaactgcttgttaagggggaagataggcaggcggagggatatgagcaagtgaattcccggagccatgacggggcatgcacagatgctgtggagtagggtaggtgtttcgtgaggctgcaggggagtgaaatagtcacgtgcttcagagagggaaaacatgtggcgacctagagcatcagtgagctggtgagggtggggggtgggtgtgggggaggagcaggactgctgcttatagatactcaggtctcaggacctccaaggatggacacagtaagtacaggcctaactgtcagtcccagtcctccaccagcagcagtcgaaggtcatgcatctgcttgtctgcttgtttgtttttgagaagagtctgatatctctccagctggctttaagctccctgcatagctgaggatgacttgggacttttgctcttcctgcctctgtctccccaaggctgggattacagcctataccaccatgtatagtttatgtgctgctgagaatcagacccagggtttgtccgtgctaggactgagctctgtctccatctctgaagctacgtcttacaaacagcttttctgaatatagcttagccttaggtctgataaccagagtattcaccctgttcctacccagtgacaaattgattctaaaaatgacaaatttctagagagaaatggtgattgcaagctgggacagtttattcggtaatgcttcagtattatttaggttaggaagtaggatcactggttaaatatgaccggataaattggcacagaagatagatccctacacacaggaatcgtggttcaaaaataaatccagacgtggctagatggctcagcggttaagcgtgctggctgctcttccagaggtcctgagttcaattcccaacaaccacatggtgactcacaaccatctgtaatctggatccaataccttcttctggtgtgtctgaagacagtgacagtgtgctcacatacatgaaacaaacaaacaaacaaacaaataaatctttttttaaaaagatgtttacttcaaaaaataaatccaggcaaaaataggtaagaatttccatttcaatataaggtaagaattactatcccttggtctgacagggctatctaagcattgattggactgtggctgactaaggtggcctaggtcctttgcctgtatttgcctggtattgactgacaagttggggtcaccaaaccttacaaaggcaaagtgagtgattccattgttttgctggtgcctgcgagcctgcgagcctgttctcaatgactggttctggttgctaacacaagactctccagtatctgccagctaccttaaccaacaacacgaccttgccttccgactctctttagctattttacttgacgaaatgattttatttaagtcaaaggttgttattcacaatcattgtctgatagattgccggccaccaaatttaaaagcctagccagaagcagttttctgatgacaaaagttgggttctgctgatggttaagaacatgtgcagcaagatggagggaaaacaaataaataaacaaacaaataaagagcaagagcttcagttctgggagtgcaagaaaaatgtgagttccaccaaaccaatattcatgctaatgttcttcctttggtggcagagccactgcatggcttctgatttcattttgcttaaagagaacaagggaattgaagcagagacagagcgtgccgcttttccgagccatcggcagtattggaaaattcaacacttatttgtatcttcagaaaatgtgaaatgggagttgttttctttctgtctggtctgctatatgtagatagtgtctgtaggtggatggagagctgctgtttggaaaggcttgctgcaggctgcggagaggagtctcgagatatatgtgaggggcttctctatgctacagagaagaaagtatctagaaaatggtagctaaagcctgcatcagcttgctttctggatattgaacttgagcgggctcaagttggactttgtagagattcagagaggcagtcccccagagtccattcctgcctgaatgtgacttcaaagatggtgttgagagaagatacttttaaataagctggaactagagtccattcaactttgcatatcccctaaaagtaaactcaagatggcacatcacctgaagaaagccttgactttctgaggttaaggaccaagtcaagtcctctggcacttctgggccattttatgggcaccacaaaattttcagggacagataatagttggaccatcctatgaatctggttacctgttacatttggtttatatggcatgatgatactggaggtgtgggtccatgctcatattaaatggagagccagctatatctcagggacatgaaactagagcagcagaatgtctcctctgctgagccatgccagttgtgggatgagtacctcaaattctcatggtgacttgggactggacaggccaggagctgctggcagaagtgactctgaaaacactcagtgtggtgaataattgcacctttgtcattaaagagactctccaggttgtgaaggtagaatcccagcgtgattcctggaggttgggaaacgtctgtgttttcctttagaagtcatttggctcagaatatccaccaagctgtaacccttgtgtttaacaaaaaaaagaagcatgccatttcaaatggggaatccctaggagtccccttctgtgttctccacatcattttggatgtattcagctgcctgtcattctgtgatcacataagctctgcagaggtgtgacctctctttggcagcctgaactctagagataaagaagaaacttaaagggaaaactgacacatattgtaaatattctactggaacttaaaatatcacagtctgctttccccctctcttctttctgctacctaattcttaggagaaaaggtcccgaatcctgtacctgcaggaaccttttggatattgtgatcctctgttagtgtatcactccctcagatatgatgagcctctgtgagcgtatgcttccttgctgtgtgattttctttgccagtgggttcaggttgcctgaaatgtgattagattcgtaggcatgactgttgtcaagagactaagtgtggtaatatacattggatccaccaagatgggcatcctctttctgatctaagaaataaagatatactccacgctgtcctagataacctgctcagttatctacaaatcccactgggcatcctgtctccttatctgcctatctatcatctgtttgtgtatcatctttcttatagtatctaacttctatatcatttgatctatttgtctatcctaccgtgtgttatctatatctttaatctgtctttgctatcacctgtcaacctgttcatctatccatttatccagctatcatccagctgcattatgcttatgatgcctatctttcttaccatctgtcttcttcctccttgtctatccctagctctctattatctatcatcatcaccatgtatctattatgtatttctagctacttatgtatacctatccacctacctatccgtcatctatcaaggtatttgtctaccatctcttactgtcattatcatctatcaaatacttatgtctatcttatgatttactgtttctctctccatccccagtgtgtgaagaaaaatagcagtctacttgtggagctgatggaatgagcatggccgttaattcatgtccatcagtggaacagagagaaattacaattaaagtgacagggatagctttatattattgaatactttttattagtgtctgttaaatgataatggacattattgtgatattttatatctatatttaatgtattttgatgctacatatccctgactatgtccaagtagtctatctccctttttactgatgccttcctcttttcaactactctcttctactttaaattttttaacccatgaattaggcttacttatagtaatgtgggtgagaggtagtttacagggtcatgggcaacttacccatggctgtaccactgaagaaaatggttcttttcccagcaacccttaactaacccacaaatcctcagagagggccagggcctctcattttcaccctctgatccataatggaacattctggtcctaatcgtattcaggtgtcatttaggcaattatagctgctaaatgttaacaaatgcaaagactttgtcattccccaaagacaggattctacaacagtacccttttctctaattcttagattctttctgcccccctaacatagtattattgagccttgtaaaacattctaatagaagtctcattgggcgctaactgttaaacactctcttactctcagcacctctcatgagtctctttagcaatgacttttcccaatagcacctgacagaggaaaggctttgttggacagaacctgacttagtcacccatcagaatcaaaggcagtgtcatacatgccttttgacagtacttctgctggaagttaatgttgagcatccatccattaagagtagatttgggtgagcttttccaggataatgcacacacaacagcttgtgatatggacatctgttggatgcctggaacacaactaaagaaaagtgcaagctgtttctgtggctctctatattgtttgcccatatagaggacacagtacactcactgaactttctaattttactgtagagaaggacattgtagcaatgatgatttaaaatcaaagctatttcgttcttggaccgccatttacctcattatatgggctcagaaaaaaattctttgaataaattggtcattaattttcagtgaacttttttctgggtccatatttaagtttactgaacaacatcttttaaagaatctatcagacatctgcaacttccagtcatagctctagctacagagactatagtaacatgatgcccctgctttcaaacagtacagtgatcagttagagtgctgaccatcattgaaggaaagtggtgttgtgtggcaggtgctcaaaggatgtttctatggagggatttttggaaggaagacatgagagagcaaaagcatgagctatctggatattgccatatcctgttactatagcatagcggagaccattgacatattaaaagaagaaaaatatttggactcagagttgctgccgttccagtcatgatccagttggtccagttgctttggcgtcgttggtgaggtggcccatcatggcagggagcaagcacaagacagctcttcacctcagtgattcaaagtgataaagagaaagaagacagactgggatcccttcattcggtccatgtcattccaggacatgctcctagtgacctaacatttatatgacctctcagtactggcgagcactggggaccaaccctttaacacctaagccttttggggccctacagagccaactcattgcaagatgattctctgcagttgccagatccagcaggaaaaatgtaagcaggggaatagcagggtcagcagctgtccctgcggggtcacagagcctgcattatgtgtgacagtagcttaggggaaatgaccagattagtgttaagtgctccatatgcaaatggagaatgtcatcttgtccaaagtcctgtagtcttaaagagatctaactgaggtttgatcccaggtgaaagaggccacggcttttctgtggtacccattggagaggagcttgctgatggaacatgttctcatcataccaaaccccaagggatgcctgtgctttgtggtgtggattttcaagaggagttgctcagacagaccatggttgatggtctccttagctgagggagggactcacgcttatttctgacctcttatggaaaacatactcagcgaattgtattttgatagtttgcaaggcaaagccatttgagttaactctgcccagcgataacagctaactaagaacttagtctcatttgtgtgtttatatgtatagtgcatatatgtatatgcatgtttgcatgtgtgctggcttacatgtggaaacctaaggttgatatcagcaatcttctattggttctcctgccttattcatgaacgcagtacctctcagtcaaacccttatcataaggctagtctggccagccaggtcgccctgggatcctcttttctctcttacgaggctgggatcataggtgggccactacacggagctgacatttatgtggattctgaagatccaaagtctggtctttacaccacctggccaacactttaaccactgagcaatcaccccagccccctagcccctgcccagctctgtttatggggcgtctgtattttctttggcaatcatgggcacagccactgtgcatatcagcactctaacattttagagagaccttgttgaatttgaagacaaatgggttggtattgaaaaaagccacaagaaagaaaaaaattcaatatcggatgctctttcaaatttaattgctgcttgtttccaggctgaaatggactctggaaggcatgttctggttccagtcatagtcacaaaatgcattctgatgtgcagcaaatgacaccgtagctctggggttttctccgctagtcacaatgaaaagatccaatgaaaatgttattgctttatgataactacttacgtgctactacagccagccctaattagatttatttgtaagctcggtttcttaacttgtactgacagccaatagaaaaatcagatgattgttttaatgcagataacaaaatgtcctacaactgtctgcgttgccttcttccatttagtccctgggttcaaatgtccctcttgttggggatagtcagcgccctcggaacaaagtatgacctgggacaaagtgcattgctatagtaactgtataataaaatttgtttctttttggggggtgttgtaaattgtatgtttgcatacatgtatggaagatgtatgcacatatatgtgtgagtgcatgtgctggcatacaaaagtcacctctgtgtatcttcctctgtcatcttatcttttgagactgagtccaagacctggaacctgaaactcaccattttggctagactggttggcaaagcagttcctgggatctgcctgcctttgccttcctagtgctgggcttatgggtgcccgccaccacagttgactctacaggttctgggactcaaacactgatcctcatattggtgtgacaggcattctctaatgcagccacatccctctccacacacagtatataaaatgagagttcaatccctttaagtaatatgagaaagcttcatgtttttaaaggtccttagggtgtatccatcctggttgatagttttctgaggcagtcaccacattaattattttcttggacttcacacttgacaacgggtgtgttatttgaagaaatatgatactggatggtgttaagtgatacagactactgcttaccacacatatccaagaactctgtcaaattaaatgttcataagtcgagcccttatcagcttccaggaactcattacactccttacaggtatctgaagtatttggagtgtttggttcaaacccatgcttcattggttacataaaagaaagtacaagattgactttcatatttaattagttgcatttcagggggatgtgcacatggatacagatgttttgtggatggtagaagagggtgctggatcccttggagtggaaattgcaagtagttgtgagctgctagatatgggttctggggaacaagcagaggtcctcttcaggagcagtacttactgtggaccacagagccatctctccagacctaccatgggtctttcaaaacagaatataaatctctggacccaactgaagagtatttccgttggagaataataaactgaagagcttttgagcatcaggcaccccgtctagctgtttctgttttcctagccatcatggctgggttttatgtttcttagatagcagagttagttccctgtcgcccagcagagaattttatcacacttcatcagaaactgccaaacttaatgaaaacctcttgtcaagagtggtcaacacatccttgttaaattcaacaggagttgacgcgattgtgcttccttgtggtgtcttcttccggcagattcttaccctcattaccaatgcagcctacaagcccgggagggtcctgagagaattacagctggtggaagacccagagtggaactcccaggaggagattctcaaggcaaagtaagtgtcctcggttttgggaaaggtggggttggtcatactccccctgctgtcccgaagctcccctctccttggtttgatagtatccagacaaacagaagctaagagaaggtctgttgtatcacagctccgtgtgctagtgtagacgtcctgcctggattagttttagtatctccatatcagaatacttaataaaagcaacttaatatttttcctcctgggttcaagttcagcccgtgctcacctggctccctttctaggtctactctgtggcaggatgacattatggtggcaggatgacattatggcagaggctgtttacatcatagtgggcaggaaaaaggagagatgagctaactagggatcatcttccaaaacagtccaacagtgacctatctgtgccagcttggtgccaccttccgaagtctctgccacctcctaaaatagaacttatcaatcagttaatcacaagggcaaggggtgaagggcgaggagaggatttgttttcccacagaggaaagccgatgacaggcaaaattacttatttccagaaacccttacatgggcttcacgcatagcacagaagaaacaaagcaattttcttcctcttattttaatattccatatttgatgttcaataaggggaggcttgtctgtcataacagagcatttttatctagaatcctattatggtgaccctgtttaagtgtttaggtagcgaaatccttacttctcgctttcaaactttcctgtaccatttactgtatcctagaggctcctaagggctatggaaagaaccggaacacaaacatcttaaatctcattacaagcactgctcttcctaaatcagccagaaacttattccctgacaggaagagttcattttgcaagtgtttgcacttattttcatgttacagagtcgatgggagcttttattaaatccagcctgatagaattgaagcagacaccttgctttccagcctgttcaattacaaaggcaacatattacctctgctatcaaggctggcagggaggtcctccgcaaaaccttccaaggcatctgctcaggaggaaatgcctgtctgcgcgggtttctccctgcctgatcatagcatttcctccaagcagctgctaatgatgacagcatgctgtcagcaggagccccggtgacagcgctgtctgctgtgtcacctctttgcttctcatggcaaatgacaactttttagaccctgacaatgtggctgtgcttttctccatgcaaatgagagatgattggagagtgaaccagcctcttcctcggcactgaaaggcaggcagggtctctgtcgtggatgaattaacttagcagaggttagacctggactttgagattgtagccgcgtttgttgtccaagctgaactgtaatgtgacagtgtcttcctcccagagcagaggacctgggatagcccctccccagggggaggggtcagtgcctgttgtcaggtggcttctgtaattgctcattgttttttgttttgttttgttttttgttttaattttaaaaatgtctttattagcatacataaattatacatactaactagttttattgtgacatttttatccttgtatataaggtgtgttttgattgtgtcccctcccccaccgtttcttatcccccacccactcctcagattctcttcttcacacccagtgatcttctactcctttctcctcctctccctcctccttcttttctcccttctcctcctgagctacctcttagttcatgaccctgggagtttcattagcgttgcttaaaggtgcatgggtagggagatatttatagatatatgaactacctacctgtggctataccagagagtgaattctctcccaccctggtgtgtgtgtgtgtgtaggtggatgagtggggatgtatttttctcaaagaataaagaaagttttctttaacaagataaaagtgtcctccagaagatttttgacctgtaaataaaataaaactcagtgtgaccccatgtagtgctctgtcagcattttttcccctacattcccatcaaccatgcctttcacactactaaggaaatggttgcagggtttggacaacacgccttattgttcctcagcacgtgtctgaaaactggacctcctataccgacaaagggaaaatacattctgacgacatttgctgagatattttgtatggagaaattccccaccgacaaatgtaaatattccaagctacctacattattctgagttttttaaaaaagatttatttcatgtatgtgagtacactgtagctgtcagtcacaccagaagagggcatcggatcccattacagatggttgtgagccaccatgtggttgctgggaattgaactcaggacctttggaagagcagtcagtgctcttaactcctgagccaactctccagggaattttactctctgctttagggggagctgaaaccattgtctatctagaaacactgaaatgcttcccacatattgtagtttctttttatcttatctcctatttggatggttttgagcctgtgttggggaagctgggttgaagatctacagatttccccacaaggcttttgttacaggtttgctccacctcactatcttgtggacaggggcagcaaggctacattggactctgtctctgtgggagttgtgctaactctggacaggtaatggttggctttgtgagtttttaccatcttgtcttctttggacatttccgaagcttgcatgttatgaacagaaggtggtaatcctgcagcatcctgtggacatctggaaaaagggattctcatactgaggatgttcactgtaaaagacttgcgtgcccatttgttaactcttgtttgcctggttatcagggcatcatgatttgccctgactgaggagcctgctgaatgggggctgtgagcgggatgttagcagtgagtgagttagagctatagctcagggaaggccatgggttttaactgtagctctgtgtgtgtgtgtgtgtgtgtgtgtgtgtgtgtgtatatcacagtatgtgtgtctttttctatgtgtgtgtgtgtgtgtgtgtgtgtgtgtgtgtgtgtcatcgtgtgtgtattacatctggggtttcaaaacagtaagaccctaagaatggcttcctgtgactcctgtacagtgttagtgctacactcttgcttcttctctagacaatgaaatttgctttgtatcaggcctgagagtcggccctcttgctcaggttttcagatgccagccagaggctgctgtggcaataaatccagactcttgtcctggcccatcattgtagtcacattgttagccttggcctctgacagcaggatacctggtgtacacacacagtcagaagcagtttagggaggaaggaccttgtgtccacagacctgcaggggtacctgtcattagtagcttatgggcagctctgggattagagaagcaatcttgattatcctgatcccagtcactaaaccctttttgcttcctccacagttgatggctaggtaggagctgtcctaggagagacctaggcaacttttgacagttgaggcagaccctgagccatggctgaatactgtgtgcctgcagcaccatgccctgaaccgttagagctagactcccagagtaatagtatcttgttggattacagccctctactcaggcactgcaccctcctggctcagtcctttcacctccacatcatctagacagacatgtaaggaaaaacatttaattcttatttcagtacatttccatgggcctttccaaatgacgggggagggggtgcgctttagcaaagcactcttttcattataagacagtacaatgacacacatgtgcagttgtcttaatgaatcccctgactttgtgtgctcactttaaacattactaaggcaaatgacaaagctcctgtatccagggaacctgcctgacatagggaagcgggagagatgcttgtcccttgcccataggaagtggccccactctgcccatgtctcttgatgtgtttcgtcactgtaggcttgggaaatgtgcataacatgtctttgagttccccttctcagtttggcatctgacctggtgttctcatttctcctgccgttggtgtcatgccatttcattttatttcccgcaaagagacttaagattctcaattccaaggtctttcaagcagagttggagggccacaaacaggacaaagataaaacttacaagggagaaaaaatgcacctgtaaaaagtttatattctctgcttcctgcaaacggtggggtgcgccatgttctcagagtggggctattcttgtcgtgaaatgcaacagcagtagaaagtaagaccttctctctgcaaagtgcagctgtcccgggccacagggagggctgtctctctacagagggtccatgcaggttctagggaaataattaacatcgatagcaaagctatcagctttaaaacatggctttgtctaccaagcattggtgtgagctcttaccgtacagtaagccatcataggattggagaggaaagagggcattagtgctgggttataaaaggccagagattaaatacaaactactgtttcaggttagagtttgcttgtttgctttcctgttgagactttgaaaatggcttgttagggaaaacactggagacttcaggaagacattgaattttaagaatcacgatgaagggtctggagaggtagctcagtggttaagagcgctggagaacattgttttattacctttaatctgtgtgtgtttggagagggtcatatgtgcacatgaatgtgggtgcccatgatgactagaggcaccggatcccactggaaggagagttacaaggggttgtgagtcatctgatggtactggggactgaatatgggttccctgaaagagcagctcccgttcctaactgctaagtcacctgtcactctaggcttggatcaaggctttaacctgcccgttttgatgatgtccttatcttagagtgtccatcctttgaacgtgttctctgggctctgtgacgatgttccaggaaagggttgcacttctctctgtgggcaggactgggtggggagtaaatgatgtccccagaagcgggtttgtggagccacctgtcactctggctaccctaatggtcaggttatggtgaagtggtttgctcttttgtatggatcctttgagacttcaaccatatggaagcctattactgaagtagctctaaagctggtgtcccctagtcccaggacttcgagagtggaagggtgactttacaggacttcacgaagggggttgttttgttttgattttttttaaaaatatgcttctcttgattgtgaccttgcttgcctggtcaccgtactgtacagatgccacttatgaataatggagattgtcccgcctttcaacaatgcactgggccatctggataaacgatccaatttcaatgacttgactttgcatagcttttcaagtcacattcaccatccagtatgcactcacactttcaaaaactgaagagtacccagtagatctcatcctgaggaccataacagatatgtactgtgctatgctatgctatgccatgccacaccacaccacaccatactacacataccacactacaccccacaccccacacactccacatcataccataccataccataccataccataccataccatagactatgccatcctaggcttggctatgagactatgtgtaacatggtgagaacctgtcacacagaagtctttaggttcagtactattaccatgatctttgtgctcacctgagaatcattctccaacattcccagcaagatcacaagaaagtataaagagaaaatagaagccacccacagtgcactacgttattagaaaatagagatctcactttgggagtgtacttaagctggtcggttttatgttgtagccattgaggtgacaaaatgtccccactgaggagaacgtgggaggaaaacatggtttgggcttggagagtctgaagtttcagtctgtggtggaacagtgtggtgtgcagtgaatggaggcacagagctgctcacctcgtgtgagtgatcaaaagggactagggacaaaatagaggcttgccccagtgattcattgtctccagcttctcaataacgccatcaacttatgaatccaccgacaaatcgctctgctgaccaacagacagctcgtgagctagtcgtttccccaaagccccaaggcttgcatccatacatctaacacctttaggggacacctcagattcaaaccttaacaatgttgtgtgtctccaatccttggcccgtaggctgcatgcaccccaggagagctataaatgagacccaacactaaacttacttgaaactttgtgatttttaaaaaaaagtctttatttttattttgtatgtatggatgttttgcttgtgtgtacatcttgtacctaccatatgcctgcaatgccctctgaggccagaagagggagtaagaccctctagaacaggagttatagatagctgtgagccaccttgtgggtgctgggaacccccagcctccattctctggaagcatagccgatgctaagagaaccacagagccatctctccagacttgacagtcttgccattttataaatggattaaaacaacaccaacaaacaaataacttcatgtgcagttcttgagtgtgacttcgtaggtgacaatatctgaatctgtcacagtgccaaaaggtcagacacacctaccagtctcacagtttgaaaatgaactcactgttgttattctgtccgttattgcccagatacgggggcaaaacatacagggccgtggtcaagatcgtgcgaacagcagaccaagtgatgaatttctgccggcaagtttgtgccaagctggagtgctgtccaaatttactgagccctgtgttgatctctgaaacctgcccagagaactgttccgtccacaccaaaaccagatacagtgagtacaaagaaggcaaagacaccagatatgcctgagctctacggggctgcacttgggtgcttgtttgtttgtttgttgtctatttgtttgtcttggtttttgtttttaactctttgcagacttcttcatgtgagtacctggagaactctttaagattttctgttgccgatccatgtatgtcttagcctgaaaaaagaaggggatgagatggatcaaactaggggtggaggattgtcactagaaggttttgggaaaggagaagtgagaacctcagaggaccaactgattcctaacctgcatgcatgaaggaagcactttataaatcgatattagtaatgttcaaggactctaatttcttgtcctggtataagttttggatttgtaatgacaatacttttttttgggttctatttgtttgtccgtttgttttgttttgtttttgagatgtggtcttttttttttttttctgtaaccaaggctagcctaaaactcactctgtgactagggctggcttcccactgtcagcactcctcctgcctctgctcttttgtgttggaattacagatgtgaatgaatccttcagtgctgcccagtggttcttgcatatcaagaggggaagtctttgcaaagttatctttctgcccagaccctgtctgcttctcctcttcttagataatccgctcaacactctctcaggctcctcaccatcactggaggattcagaagccatcctcccttccttcccagctacctttgctttgccactgctgtgcaggactctgagtgggtcccacttttccatcctgtaatgcttgtgactgtcaccccccaccacactgagagacctctgccttccacagacagcttccactgccatcatttcttcagttctgagaacttattttccctccaccctggttagcctttatcactgtagaagcctctaccttagacatctcaagccctgagaactccagtgtacagcttcagagcttcctaatctccccttagtcttctctggtcctggggccaggaaaaggaagttggatctgccagcccaggttccagccacttagagataaaggatgcacacagtgtggtcagtgctctgaaccacagccacctgtggtatatcaactgctttgttggaaccagggatatgaatatggtcgagatactattcatagtaaggctcgtatgtacaaaaccagacacagtgcaaacacatgtgcatgagcttgcacacacacacacacacacacacacacacacacatactcacacagagagagagagagagagagagagagagagagagagagagagagagagagagacagacagacagacagacagacacacacagagacagagagagggaaaaagagagagaaagaaacttggcaaattaaccttccactcccagtccctggcatagaacccagtcttgctcctcccaaacaggcattttgccactgagccacatccacaggccatgttgttttgagacaaggtgtctcagttgtcttgttgctgtggttgattaaatactctgataacaacctcgggggatgggggatttattttggctcacatttccaagatacagtccaccatgacaaagaaattacaatggcaagaacttgagaggggtagtcatgacacatcaggggacatagcatgcagggagtccatggtagttgtcagcttgccagctcacctcccacctctataatcaggccaagataactccccacctgaacagccaggtgattctaaagtctgccaagttgacaatgagccctaagcgtcacctagaaagtccctgtgtgatttaggttccctgtacagctttctctgtcctcagggtgctgacaccccctgttcatttctacatcaccttaccttgggccagtgccagggtcagcaagggtcactgggtagctattgctcttgaaggtaactaacttgaccgaggccttaagttgtaaataggttcttctgtattccctagacaaaagggagaaggggtcatcattgtcacctgcaagtgaactaaaagatgattctgcatcccatgccaccaaattgcaaaaggctaagattcctcagagtgagtattgctgtcactggaaactgaggtacagtggcaggggaacaagcaaacaaacaaacaaaccaaagtagctgttggttaaaattgggactagtgaggccagagatctcccagtgggctgtatggctctgtgatgaacccatcattgactataatctcagtaaaactgtcttcctccctgcagcctattattatggaaaaagaagaagggtcattcagtcgtcacttagagtcagcaacatcgaaactccaccaaaatcaaccaggagaaggaaacgacggaaatcagtctatgtacagaagagacggaaatctgctatagtcgtcccagcaggtgttccagcaggcgtcccagcaggtgtcccagaggacatcccagcgggcatcccagagggcatcccagcaagcatcccagagagcatcccagagggcatcccagagagcctcccagagagcctcccagaggccatcccagagagcatcccaaagggctcagcacaggtacactgtccttaaagggcttccagcccttttgattagaagggttttgtttgttttctaatttaatttattatttatgtgtgagtgggagcaagatactgagggtggaaagggagtgggaaaggacagagagaatgagaacgcagacgtacgcttgctatgctgcactcgtggaaggtaaaaacaacttttgagagtctgttgtctcctcccactgtgggatcgcaggatcagaagaaaaaggctgtctggtttgtgcagcatgcactttgcctgccctgtttggatgttttgggggatgctaggcaagcactctatcccttgcagttttgagatgtctccctatgtagctcagagttggccttgaactgtatgtgtgtgtgtgtgtgtgtgtgtgtgtgtgtgtgtgtgtgtgtgtggtgtacaagcatgcaaagaacagaggttaacctcagttgtcattccttgggaaagggtccaccttggatttttgttttgtctgctcttgtttttgaggtacggtctcttgctctgccctcccccccaactcatcatttttggctaagctgattgaccagcaaacctcaggaatctatctggctccaccttcccaatttctagcatttctacatggcttctgaggatcaaaccaatgttctcatgctttcatgacatgtattgtaactattaaactctctctctctctctctctctctctctctctctctctctctctctctctctctctccctgcccaccccgagatgggtgttcagcacgtgttcagctacagattaggagctgtttgtaaggaaattattttggtgtcatgggctctctttgggggcctcagtggacaaaccttgccaggggctttgttttgggaaggaagggacatggcctcagggtctggcagtgtggctgttggtgagggtcacactgtgtcactcaggccctttcggcccacccccactaagcacgtccctttgcctctcagaaaactgaacaggagaagcgagaaactctggacactgcaaggaagaaaactgggtaccatggtccggcttaccagacagacacctcagcagcacaggtgccctttgcccggccacgaagggctgtaaccctgaggagaaattccgaggctttgaagcgacctccagtggaaagggcacggagggtccgcacagtgccaactactgcttcttctaataacagagtcaagggtccacttgttagaattgtgaaaccagaggtgagttcagagagcagacggtgcatggctcatctttaagaacatggactagagttaaggctgtggtcccggaaaacctctttaaaatatcagaaatgaccagagatgctctgtcaaaattcccaaatccaaggacaaaaaagaatggttttaccttttgttatagatccagaaaacatcagacaggagttccccgggttggaataatatcttcatttctgggtgtctttaatcttccagagcttcaggtcaggtggaggagacggcccaatctccagttctgggcctccaaattccatctctacatgtcccatttctagacttgaattttgcatcactctctcctttatgggacacctctctcatatcataacattttaaatcagcgtgcttggcactactgtaaccgccaggtgataggtgaactgctgcaaaagaccttggtgccattatcacaaaagtcagtggcagtgacagcgcgctgtctgcctgcaagcagctttgcaccttactatctgttcacattttaaacagagatgcctcgtcagaaactaggccttaggttttcacaactaggggttcaggattgatggtcattatgacatggagtagggcagggacatgttcctagttgtgcgtagaagccagggatctagctcagatgcaataggagccttccactcttttctttcttcttttttttttataaaaaatattttgaggaaggcaacctcatgcctggagcttgcttagtagtgagttagtctctctgggtagcagttcccagaatcctcctgcctctacttccccaatcccaccactttttttttctcaatgtgtgatctggtgatcaaactcaggtccttagacttgaatggcaagcattttgccgaccgagtccccagccctgctgtaccttctgttcttaacgcttttgaacttttgaagatacccaggtcattgcaggtgtagaagttaccagaggcaggttgctaagaaactctgtagagaccgagttctgcctgtgtgccccgtgagagaccaagagagctaggagttctactctggcagtgtggaggcacagaggttattaagaggatgcagctggccctgcagtgtgcaatgacagtgccctgccctcgtccctgcaggattcgagccaatcggatgaggagaaactgatacttgagagcaatcccctggagtggtcggtgacggatgtggtacgattcattaagctgactgactgtgcacctttggccaggatcttccaggagcaggtaccctggttttctgggtcatccgtgtattttctggactccaggtcttgtctctgtgttcgtatgtccatgcataagtgtacttgtgtgtgtgtgtgtgtctgtgtgctcccgagcgcacgtgcagttatgtgtgttatgtgtgcagttacatgcatgcctgtgtgcacataggcatacatgtgcatttgaggcccaggggacagtgtagggtatccttcctcaagcgatatcacctttatgagacaggttcactctctggcttggaactcccttggactgactagacttagtcctgcctcccaagtgttgggattccaggcacattcagctttttaaagtgagtgctgaggaccaagtccttataaggaaactactctactgactgtactgtcttcccagccctaagactcttaaaggcattgcctatgttatctggcttcctcaggacttaccacagagggattaagtctcatatgcccttcggctgcataccgcagttgatacctgtaagcgggttcgaccacgctgctgagcaggtatggtgtgcctgacatgagggtttctcacagagaggttcctgtcactggcagaagagtgatcatctaggctccacccttgttcacagccatagcccacttcctggtaccagtttctgttgtgctgttgctgtgataagatgctctcaacctggagaggaaagaattgatttcctcttatacctcataatctcgaacgaagggttgtcagggaaggagctcaagatagggacctagaagcaggaacttgaagcagagacttgatggaacttgccctctgtcttcttaccacatctgactcagccaatgttcttatactgggctggagggttgctaaccagcaaaactttacagagtaaatatctgtcttttaagacctaatatttttctatatactattttctatatagttgattaaagatatacctacctagtctgtttttacatttaataagctgataatttgagaagataaaattttaaacagtatggcagaggaaaaaatctgatttcccattgatatagagaattttctttcagtccaagtcaatgttgtgaaatgttgtaagaggcaaattaaagagcatcccaggactccacctcctgctcccatgagtgtagttcttggtatcctatctctgctgccctgatatcctcaaagtgaagtgattaatctcatttgctctggaaacttctacagactccacaggaggtcatatggaggcatgatcaggagccagacaggaggcctggctcttggatttctgccgttcactgctcttcttctctgggtacagacagagcggcagacagggagacgtgctttctgacctaaagaacgagggcaatgatctgtcttttcattacagcacacagacaagacaggaaatggtcagcagtgctgtagcttagctgatacatggcttactgataaaatttcatctccatcttagaaacaaacaatacaaactattacagaacaagacatctccatcttagaaacaatacaaactatttcagagcaatagttaggaagtcatgtaaagtgctgtctgaggcattggtttcccagctgatacttagacatagtaataccaaaacaaacaaacaaacaaacaaacaaaacaaggaaacacctgtcgtattcaaggacaggacaagttctgacaatataggtttaaatatgccaccatgtatatgttggtccatatatacgttcaacatataccaacatatacagatctaatacctgctgtacataccttataatgtccaaaacatgacaatgaaatgtgtcattctatataaatcttaagttttattttggtttagacccaaatgttccatttccctttagaaacattatcctgctctgagccagaataaagaatagggttttgttttgtgttttgtgttttgtgttttgtttttgtttgtttgtttgtttgtttgttttgacttataggttctaagttagttggaagctgacaaatatagcacaaatggttcccaggcttttgtgttgacactgtgttcagagttgtgcaaaatctcagtgaggcgctggcttgtgggctgggtagctaaaacactgcttttagattcctcttttatctctctgctaagcccagtttccaacaatacctcagattgtttcaaggaaatgaaattgctggcacattccaccatagattcagagtaggcaacagcctcgtccacccacctcctctgacaccagctaaaagctttgtccttgatttagacgttaggtgggcttttcgtggatcagtcttgttcccaattaattttgcatttcacattagggattttcaactctttttttttttttttctttttgaaaagtgttgcctgctggtatgctaacgcgtgtggacacttgagtcctttcttgtccattaatgacttatttttactaactttttttttctatccaaatggcagtgctctgattgggtgaggcctccagaaagcgtttgctaagctgtcagatgaactaggtgccttcagatttttccctggcctcgacaggagatcacagtttagagactgatcatagcctcgcgtgttcttgcctagggaccttagggtttccaagatggttctgattactgggaacaattgcagacgtcacaccctccccattgccagcatgcataccttttatttccaaaatgctgtggcagcttcttagtaaaatctactctctgtaattttgtgctgcagttctgaacattccacagtgagagtccacacatctgtcatgtggtttttgaacacatgtccctgaacagcagagactacatgctcgcccattgccaatcagagtgctcacaagagaagtaggctgcctgaacgagtcacttattttatgagaacgttccaggatcattggcagctttagttctcttcgagggctttcctcttcttcatttcccttgacctacgtatttttccgtttgcatccttcttgcaaggacaggagctgtagtttagcttctttcagtccatggttgtttgggtctgctatgtctgatctcctgcagctgggcctttgtggtgtgccatggcgaagcatgaactgcatacttcccaatgaccagaaagcaaacaaagatgaggaggtgctggaacaaggtttcaaggcaagcccttggtgatgtacttccactgcatccatcgaggtcaggtcatggtcctcaggatcaggtcgctaccctaaagctcgtcaaacattagcatcgaggaggaccctttacatgcatgcccttacatcctaggctctcccattatcgaactgccaaatcctcatgaactccagccatgtacgtatgaaattcctatgtcctcactgtagcatcctcccttgtctatcaggacatagtttattccttcagagtgttctgcagatgtggtgagtctgcttattttcacgtggtatattttacctgagtccgtctccttaaaattagtagtctgttagtgattcagtctaatatcacaactggtctgccaacacttatgagtcatattggagcataatgataaacactccatcaactgtgaatttggtgtgtaacctacatcgcccatgagaagaagagatttgtggtacaggggaatgcacaaagtcatctctgtgtccccttttgtccagctttttcctatttacccatttctatttcctaccccactatgaatggcaacaagccttgaatgaatctacatcaggagtgagtctaacatcagggttagttagcccagggttagtctttgcacacgagtggatggctggatggttcaaacctagctacacttagcaggcagcagggggattggaggcctggtcttattctgagtagcatggtcttgtcaaaaccatgacacgcaggaatcatactgcctaacatttaggaatgggaaataaactgggggcatgcagaagtagaaattgtgggccctcacatggctctaatatggaaagacttcattttaagtacattccatctctagatatcaggagaatatttgggtggatttttcccagataaagaggagggtgaaggatttctaattagattgtttggccttagccctttccctcggcacatcttgtacagaggctctcaaagtcagatgttcaaaggctgcctccgtggaacacaggtaaaccaatagctcctagagggtttcaaagtcgagcctttatctgcttttttccaggtcgctaacctcgacatttaccagatagtatgctcgctttctaaccaaagaactcagagctgaaacttggggcttccgtcccctgctgctgagggagcaggagaggggccactgatctttcaaatttgttccactctttgggagaagtctaggcacagtatgattggccaggtgctggggccaggacagaagggcacctgatctgaaaaggtcagagattgccatttcaaggcccttgacaaaagttttaaatagtctcctccagtctgcatggtgtctgttagctctactgttctccttaacgctgtgaccccagggcggcctttaccaccatgttgtacagcaggctgtggaatcctgttctggctcagagaggatgtaaagagcttagtatttctttgagcattggactgactgcctagaatcttctatgtaaggtcattatagaatcagtttctgaatcgtttccttgcctaatgacttttatttatttattttgtgattttattattaattttttacttttcattttattctactatttcattctacacaactgcaactaaggttttgtttaattttatctagtatgtgattgtcctagatctattggctagcgcactccagagctctcaccatctattccttccccgttctgagatgacaggcatgcatccctgcatctagctttcacacggatgctgtgagtctgaactctggtcctcatgtgtgtgtgtgtaggaagcactttgtcagtgatccatccccacaccaagttttcttttaaaaccctcacagccaaaggctagaatgggttggacatacacaatttgaagaatgtgcacataggtgccaagtacttagctcattatccccctcactgtttgctgaacgaattctacacacacaactaccactaaggtttgttagttctattacccatgtgctttagtagactaaaaagattttaaaagcaaaacaagattagtggagtgtatcaggcagatagaatctgctcattatttctgcctctctctatataatgttctaatttctgtagttaattgctaacttaatatgtcaaggacattcatctgctttagtaaaggtgttgagggcccctaaatcaaatcggttctgattcatctctcctttttattaattttgttactaggcacttccatgcatgtatacaatacactgtgattttcccactcatcttctctctccatcaactccccgccctgtctatcagtccctttccccaaatcaggaattttgggtttgtaaaccatgtccagggccatctgaggatggcgtggaactctccacaggagcctggtcaagtcatcagggagaacattttcattcaaagtcgcacctctatctgcttttttcattctaccgagagtctgtctgtccgtctcaaatagttaatcagtgagaggcttttgagcaagagcttccaagatatgttctctctctgcttctgttccaggctgctcagcttgaaagtcagagcaggcagtgtctactgtcctccccttccaacaacagcctgaacagactccctcttcaaacttggggttgagttgaggcagagtacacagacacagttaggacatgcccagaccaaagggaaagggtggcgtagtcactggcagttatgacgctacagtttaaagcaaatctggaaagcactggagccattcttataacttaatcttgagaacgaactttattatttcatacctgtgttgaacatctgtccattcataggatgtttgtgtgctgaacgctgcacgcaggtcagtcaagtgcatgctgtaaggtctctgtcatggtgctgtcctctgagtgagctgaggatctggtcttcgtggttctgcctgcatgtgtagaagggtgcttgtccagtacatttatttcaagtggcaaatggttgatgttgaaggaatagatttttttgaatgagccacattctagcagtgtagaaattggtatgtttttgggagtggtttaaaccacccagtagggccactttggctattaggaaggagttggtggtcttaaaacctcataaagtttacatttaaactcagcagatattcctatagttaaaaaaagacttttggaaaagacttaaacgaagggtaagtttctcacatcttcggtaatctggatctattgtttacatgaaaggcatttggtttttgttgttgctaatgttgttatttgaagtgctgaaggtagagccagggaaacaacagctatcaacatctcttacgctgttgataccgtcttcaaaatctgtgagcgcccctgtgggcttcatgaacatgatctgctccttagcacttcccgtttctcaagttactgtcatccttctaaatagtggtctcagaagagacgagtgacatggtagaacaaaatatgggaaaaggagaggtcggtatgcaatgtggaaacacactggaagtttcattcattctctttatggctgcatagaagaatgaccaactcatttttgaggtttgatgaggtcgtatgtgtctttattgagacatggcttattccattagtacagtcagtgctcttttataattcaaaagtaataagccacattcacggtgctattttacagagagtgtgagtgtctactttttcctgttactgtacttatcagggaatgttgtggctatgggcctgatcggataataagctccttgctcttgctggcagtcttcagatgataaatgatagttctcttaatactgaccttctcacagctgcactctttacatactgaggtatttgtgctattatacctttagaaaatagatgatttctttaagataggaagacttctatgtgaaatatgttgacgtgattttacagtgcatacctaggcaatggtgaatagctattaagtccttgtggttcatgagagtctggggtgtaaaatttcatgtcactgaaattctgccatgctgagttcaggtcaccactgactcttagcaccaatttgagcctctgatctctgttattctcaattattcccactggaataggaagcctgcattgggaaatagcaagagcagagtacagctaagttcagccacacaatcaaaaggcatccacaggaacaaaccagcctgctataggaagtgaggtgatggagacacggactaacagaatacacagacctctggaatgctgttttgagcccttcttcctatagcagattttaacagtcacttaatggatatcatcaggatacggcacctgttgtatagatacagcagggtgaagtagaacagggagaaaccagtcctgaacccaagtgcaacactttgaggattgtgtgtgggcacagggatgagtgtgttttcatgatgggcacttgcttcgaggtgtaggagtccttgggcagcttttggagatctaatgatgtgttgcttttggaaggtgtctttaagttgttggttgtattttgttattttttttaagattaggtcttgctgtagagttctggctggccttgtgctcatgcttttcggattgtgaatgtggcattccctcctgcctgtggagatgtctgctgttatttcacaagaatcccctaacacgtaacttggcaccttcctattactcttttggaattctgtctttctcttgggtcgcctcactctactaagtctttgtgcagtcttctgagcctcccagacccgatgatccatgtttttcttaagatctcagttgtttattgctgttatctcatcatttaggttttctgggtcccacctcccttttctaagacactctcttgaatattcgtttattttgtgggatctcttattgcttgcttggctgcttacctttcccttattcccttttctgttggaattgttatctcaggagagctctctccagcttgggagctctagctgtctgcttggtgaggcttccgagcacatctgtggctgctttattcaattcttgggctccttggttttgctttgtttccttatcccaatcttgaacacttggctaaactcatcattcctacttggaggtggtcttcttgtttcattgaactgcctgtctcttctctgatatctcacttagcttccatggagcccttcttctgaatgcaggcattttgttcatttctttaggggtctgttgcttgctagtgggttcctctgaaggcaccgtgtaacccttgattttttttcacactttttatatatctacatgatatttcttgtacatctggcagattctttaggtcttaatagttttggaaggtagcttctatttattgtaaaagatgggtttttttttaggagtgtctgattggcatatgacactgacttggattctgtttgaataaagtatgatgtcacaatggtttaggccatgacacatgtgtcagtggtagtatgtactggacatttttatcactatgtagcaatggagaaactggagcaaggtaagtatagctcttacttcatagtgtgtctgtctgtgtgtttgtctacatgtctgtctgtctgtacacacacacatgtgaatgtgaacatgtgttttcctctggaaaaatcagagtatgtagttgacatctctctctttggtgcctcattacctnnnnnnnnnnnnnnnnnnnnnnnnnnnnnnnnnnnnnnnnnnnnnnnnnnnnnnnnnnnnnnnnnnnnnnnnnnnnnnnnnnnnnnnnnnnnnnnnnnnnnnnnnnnnnnnnnnnnnnnnnnnnnnnnnnnnnnnnnnnnnnnnnnnnnnnnnnnnnnnnnnnnnnnnnnnnnnnnnnnnnnnnnnnnnnnnnnnnnnnnnnnnnnnnnnnnnnnnnnnnnnnnnnnnnnnnnnnnnnnnnnnnnnnnnnnnnnnnnnnnnnnnnnnnnnnnnnnnnnnnnnnnnnnnnnnnnnnnnnnnnnnnnnnnnnnnnnnnnnnnnnnnnnnnnnnnnnnnnnnnnnnnnnnnnnnnnnnnnnnnnnnnnnnnnnnnnnnnnnnnnnnnnnnnnnnnnnnnnnnnnnnnnnnnnnnnnnnnnnnnnnnnnnnnnnnnnnnnnnnnnnnnnnnnnnnnnnnnnnnnnnnnnnnnnnnnnnnnnnnnnnnnnnnnnnnnnnnnnnncacacacacacacacacacacacacacacacacaattttattaaaacaggcattcagtactcatcaagctaattgttacctttgataatatgctcccaagtttaaaagcagaaagaagagttttttttttttaaatatttaactccaggacaaagctttacaagacaagcacatcttccgagtatattctgctttgtctctaacgtgcctttctcttctggcaggacatcgacggccaggcactcctcctgctgactctcccgacagtgcaggagtgcatggagctgaaactgggacccgctatcaagttatgccatcagatcgagagagtgaaggtggctttctatgcccagtacgccagctaactcgcccttcttggcaggtgtcgcctgattctgataatgctgtgtttgttgtaaaggtttccaggactgagaccttattccctgggcttcgtgaaatggcacagtcattggtaatcttcaaaaagccagaagcccaggacctcctttttgcaccagcctatttgatagtcctatatttttaaagcacacggaaggagcaccagcagctctgatagtattgtgaaagttctgagaccttccctggctcaggacctctgagtttccttccccctccccccaattcaaaccaggcagtttttttggaagccaggtttccttacactaaggtaggtctaggttcttcggaaactaagataaacttagtgtatctgagaagaatacctgtccatcttgctacccgcttttgcctgactcagactccagctctcatacagctctgtctgccacacacgtgcaagcaattgtgatttagagtcacctcctatcccatttgatctcacgtaagctccattctcccacacaactctgggctctgttcagcactgtcttctgtcagaggtgccttttcacaagtatggcggcttaccacgagatagctactgggtaagcaaagcctgggacatttgcaatagcaagcaccctctgtagtctcctgcagagccatagcttcaatgttctaagatcactgtgactggtcaggaggacaggacgctgctttagggaagtatcaaattccgtattgaagaaaagctttcagagggcatgtataggaagtgattttggggaagtcgttttttgtttgttttttgttttgttttgttttgttttgtttttttgtttgtgaactagctgtatccgcttagaatggtaacacagatggtcgctgcaagcagatccctctgagcctctcttctgctagtgcctggcttgccacatggaaagcaagcacaagggagcagtattccgtagcatatgatagcagagcaaataccggatctggatctagctgatttccatccattggctaatggccaacttcatgtccttgggtaacttgccaccaccctggatccaagttcccatggaggggaaaattaggacatttagtagtgaggcactggtaccttctccctgctcctgttatagaggaggctacgtagaccaaaatgagaaaaggaatgtggccacagaatgtaaccgtccagtttctgcctttcactttcttgggggttgcttgtgaaattaggctaagtcatttgtagactaatcagtgattgtaagtttgcctgatactcagcacacatctatgttttcctatgagcagttcaacctgtgcctgcaaagccaaaggggctgaggtacattagagcatggaggacacctccacatcttttgaaatccaggcaaggagaccaaaactttcgctctgttcacttgtgcctcactttggaagcttaacttcccacctatctgggccttactggtttacttgtggttttccatagttttccataattacattcatcttctttctttgactagaatcacaaccatcccagagcatgtatgacaagcttgtgttttggcagcattttaaggcatggtggtccctcaggctttgaaaacgcctcttgcctatgttagttacccattctcaacactgggccatggctgcagatggaattggaaagtaaaatatttgtggctgagcctctttagtcttccctgaagctggctttctatggtcaagctataattctttggtgaataggtatgcctaggaacaactggtggttagtctgtgtcctgtgtggaactgtaaggatggagctgcccctgataggctctgtggagttggcttgcatttggatttctctcttctaaggtacatgttaaaccttcctctgccttctcagccacatgcttttggccataaatactcaatctaccagttggaaagggtatctatttcaagatggggtggcgtttttcccatactcactccttcttgattcttcactgtggtcttttccagataagttacttcttttgcatctgaaatgggatgtggccatggcattgctagaatatggtgtgcttttagaacaaatgtggccttctcatgccatttccagtaatgacgcagaggaggacgtgttgcctcagaacatggggacttcctagaggtctgctgagcccacagaaagagccaggaaagcattaacagaaaagcctgtcaggacatgtccaccactggtcagaaactcttcttcccgtggaaccaaatgtcccagactctcttcatgcctcagccttgcagtgtagcataggtctctctctgcacagtgttggttcctccagcctaacctttggctttgggaaggaagagatgaccgtaatcttgcaacaagagtgcccaaccagggaccactgtcatcatagtggctctcaatgtgcatgtcacaccccccctcagtagacttgagtattttgatgaccaaagaggatgattttcctcagagagaagtgccagcgccctccagagctgtgatccaggatggcatgctcacgtgcggaatgcaattttgccaccggtttgtaatgtgggttttgtttctctctagacttgcctctcactgctttttgtctgaaacacagagttgatttccgagaatgattgggaagaaaagaaatggatttttatacacatacaccaaaaatattttaatgattcacttgccaaattacttcctgggtggtatcatttccttatctctctgattatcttctgggacccacgtcctttcctccacatacctacaccttgggtgcatcactccattcatggcctcctgttaccaactgcgcagacatcacacaatccgtgccatgtgattgagaaatggaaatgccacctcaacttaaataatcacagttggtcatttatgcccactttaaaatgtagggagtctgtttcggccccttttctggagtatatttgtaccatattgtaacaaaatgatcctggccacaaaataaaacacacactgatcaaagccggctatactggcattgcatatctttgctattcaacaatggtgtccttcaccacagtttctaatctagagcacggagaactggtctgtcacttttaaaattagatgcctttgatcagagtttgactcacagacagcatttgagctctacagctatttgagtccctagaccttatttgatcatattcaaaagatcatttcccatgcttgctttgatttggtcctcaataaattaaaatgatccacactttcacactgccacttctgaccttcactgccatcttcagacggttccttttgatcagcccctggaagatgggtccctcctaatctatgtcatagaattttgcatgctgtatgattggctttgtcttctatctcccaccaaataccacttcctgagattcatctctgagttttgcaagcgctcagggttttcatacttatttcatataacacccatttctattcatttctgtataaagaacagtacagaacagtatcgggatctttgttggtttgacattgctgttttgggttaagatattgagtctaggctccaattactctctatcctgtctttagagagctgtgattgagtgtgctattatttggaaggagaaaatgtaaattgagatagctgtagtgtttatgccagaagtctctggggacatctactgcttgtgtctctttggtgcaataattaaaatggaaggaggagctgaactgggaaccctacagcctagtgattcttctacttgctcgctatagctttctgttggcaaattttctcaaaagcactctctttaatcagattaacttcttaaactgcttaattctcatcgcttcttaaaactagggtggtttgcaggtatccaaaaatatgctatgacagaacaaaattgtggtattcatgacccatttaatttactgaaaaatcataactgctgtcctgcctgctctccttgggtttcggttttaaaagcctttgtggttgaaatgaataacgattcggttttctgaactgtacacatccttgttcagttttcttttgatgactaaggctcagtaccagcgagctgtaggccatgtcacagaaccgaggcagagcagtgctttgagtaggacaacaaggaacattaaagaaggaaagttctagaacaatcttttgctaaaaaaaaaaaaaaagaaagaaattgctttatggtgaaaactgtgggaagggtttttttttttaatttcaacaaaagaaaaagtgaccatcttacctgtcattcagaatgcaagctaacatcatccctgtaagcagagagaaccctagtcactaaaggtgggagccctttacctctcatgttccactttgaaaagtttgtattgacatttggttcatatcttgtgtattggtgcataaaagaaaaaaaaacagtgtttttacgttttcagtttaaaggacaaagggcgtgctctctcagtttgctgtaagattgtattctgtagatatgtttccatgtacataaaggaaaatatatatcagagttatattttaatttttattctaaatggaaaaaaaaccctttttacttgaaaacatgaacgccacattgctaataaagttaaaaaaaatctatggtggtgtttgtgtttcgtgccaaaggttactgaatgcatgtttggggcttataatatggttgctttcttctgaagtctgttttggttttgtctttcattttagaatctgctgttaagttggttagaaccatagctctcaaagtcacctcgttgttaaggaatttttacccattcctttgataaaatgctaacccaaagcaacttaggggaggaaatggtttgttaggcttccaggtcacagcccttcactaagggcaatctagggaggaacacaagcaggatctggatgctgaaccaatgctcacttgctcatccaggggctcatgtttagctccctccctaggcatggtccaacagtgccatggggctctcgggatgactgaagtgcttgccttgtgctcttgatgacccaagtcacacactgacgacccatctaaaaacacttagatctgtgtgcatggagacaagtggatccccagggccccctggccaatgactatttagttcaatgagagaccatgcctcgaagaagatgaacatcctgagcatgattccagaggttgtcctctgacctccacatgagtggatccatgtgcacatatacgcgaacacgcatacacatgctcacaaaaagagtattgatactttcatatggttcctggtcttgccagtttcaaccatctttcatttcctagggttgcctgacactttggaagaaagattgctttctttctataggaaccctagtttaataaccgcattgatacatcggatgacttcctatcacaactaggtcttgattatccaagtcagaagaggaaaaacagtctgtcactgtggtaccctagccctgagatctcatgccaagagagtcccccttccttttctgccactgtgacttgtattacacagggagagggaaaagctaaaagaggcttaggcccctggacagtcactgggacaattctatccaatctcaagtaattcacttcactttaaattcatttttagtcctgctgacagtcaaacattgcatatacaaatttttgttctcttttaattgtgaatgtttaaaaaaaatgtaggctcattatgtaagttcttactttgcagttcaaaccaacttcaaactcgaaatcctctgtcccagcctgctgtattctgcattctggctaggtttgtgcagcaatgcctggtccacataaggtgttttggtttgttaattactgttattaaaaattcaaaaatttcacagcaaaagcagagccttggaaagcacaagaagaaacattaatttcccctaataattcgagcagcagatagaggacggtacagctgagtacacatagccatcgtgtttctatttggacttgaatatccttgaaaacagaaatttaaacactgactatatgaacacttccaaatttctaannnnnnnnnnnnnnnnnnnnnnnnnnnnnnnnnnnnnnnnnnnnnnnnnnnnnnnnnnnnnnnnnnnnnnnnnntgtatttttaaatttatttcttctacttagccgaactatgtacaattttcagttcatgacacgattctcctctgttctgagatttgtggtacaactgttctatgtctatgagaaggcacagtgctcactaaaggttcagaggacatatttttaaaatgctgattgtgatcctgacctcaacctctactacagagcaatagtgataaaaccaccaccaccaccaccaccaccaccatcaccaccaccatcaccacatggtatttgtacagagacaggcaggtagatcactggaatagaattgaagacccagaaatgaacccacacacctttggtcacttgatctttgacaaaggagccaaaaccatccagtggaaaaagaaaagcattttcaacaaatggtgctgattcaattggctgttaacatatagaagaatgcaaatagttccattcttatctccctgtacaaagctcaaatccaagtggatcaagcacctccacataaaacgagatacagtgaatctaacagaagagaaagaacctcgaacacattggcataggggaaaatttcctgaacagaacaccaatggcttatgctctaagatgaagaatagacaaatgggacctcataaaattgaaaagcttctgtaaggcaaaaggccactaacagattgggaaaggatttttaccaatcctaaatctgataggggactggtctccaacatatacaaagtactcaagaagctggactccagaaaatcaaataatcctattaaaatatggggtacagatctaaaagaattctcaactgaggaatacataagggccgagaagcacctgaaaaaatgttcagcatccgtaatcatcagggaaatgcaaatcaaaacaaccctgagattccacgccagtcagaatggctaagatcaaaaactcaggtgacagcagatgctggcgaggatgtggagaaagaggaacacttatccattgctggtgtgattgcaagctggtacaaccactctggaaatcagtctagtggttcctcagaaaactggacatagtactaccggaggatccagcaatacctctcctgggcatgtacccagaagatgttccaattggtaataaggacacatgctccactatgttcatagcagccttatttatattatccagaagctggaaagagcccagatgtccctcaacaaaggaatggataaaaaaaaatgtacatttacacaatggagtactactcagctattaaaaacagtgtcttcatgaaattcttaggcaaatggatggaacttgaaaatatcctgaatgaggtaacccagtcacaaaagtacacacatggtatgtattcactgttaagtggatattaggcaaaaagaagctcgatatacccacgatacaactcacagaccatatgaaacccaagaagaagaaagaccacaccaaagtgtggatgctacagttctactcagaaaggggaagaaaagaacctcaggaagtagagggagggtctggggtggcggggggaagaggaggagaaaaatgggggctggttcagatatgagaggagatgggggagaagtacagtacaatgtgtcaggaatttgaaaggaggtgtgtaaaagtggggaagggcgagctgggtgtagccactagaaagtcccagatgccaggaacccaacaggtttcctgaacccaacagggaggactttagccaaaatacccaagaaaggggggatagaacctatagagactatatccagtggatagggatggcccctggttgagtgatggagccaccaaaccgcctcaaaaatattaatcaagaattcctcctgtcaaaaggaaatgcagggacaaagagtatagaacagactgaaggaaaggccatccagagactgccccacctaggaatccatcccatttgcagataccaaacctagacactattgctgatgccaagaagcacttgctgtcaggagcctggtatggctgcctcctgagaggctctgccagagcctgaccaatacagatgcggatgcttgcagccattcatctgactgaatgtggggaccccgatggagaagttagggcaaggactgaagatgctgaaaaggtttgcaacctcataggaagaacaacaataaccaaccagacctcccaaagctcccagtgactcaaccaccagccaaagagtacacatggagcgggggaacccatggctccagctgcatatgtagcagaggatggccttatctggcatcactgggaggggagccccttagtcctgggaaggctcaatgaattagggtaggggaatgaaagggtactaaggcaggagtgggtgggcggatgggggagaaccctcatagaggcagggggagcactgagtgcataggagtgctgtggagagcaaactgggaagggggataacatttgaaatgtaaataaataaaataaccaataaaaacaccacccacacaaaaagtgctgattatgtgaagatgaccttgggtgattccatgtgaggatcagtaaggtgaaaatactccctgagccatgaatagtggtctgagtagtttcatgacgatgtgtttatgactctggctcaagtacaggtctcagcacatctctgttgaatgtagttcgtttagtgtcatgtgtagcttgtatgtctaagtggtagaccacagtaataaacaaaaggaagttttgcccaccaaccaaggaaaacaaatggtgggactcgtggctccagctgtacatgtagcagaggatggcctagtcggtcatcaatggtaggaaaggcccttggtcctgtgaaggttctatgcttcagtataggggaatgccaggaccaggaagcgggagaattgggcctggaccaggaatgggagtgggtgggttggggagcagggggatgggagatggggtaggggatttttggaggggaaacaagtaaaaggagataacatttgaaatgtaaataaagaaaatatctaataaaaaaaagtcttgccttgtcattatgatgatggagcaacatacaatgaccaccactgctgtgtctcctcacttaatgcaagacttgttctgttttaatagcaggcttttgctaggaagttttagaatattttatatatatatgtatgtacatatatatatacacgcacacatatacatcttacacatgtaagtatatatgtgtatacattatatatgtaggtgaatatatgtatatatgtgtgtatgtttgcgtagtgtacacacacacttatatgtgtgtgtatatacatgtatgtatatatatatatatatatgataatgttgagtaagggaaaagtttacacgtatttcatattccactgacctcaagtccttattccatcaccttccagttatataacacaaaatttcagttttctatgaaacataaaatgttatgcatgtttacagggttaataggattagacacaaaataaatgctgtatgattcttagcacagaagacttaatgaattttaggaatacagtttcagtattgaccaagcccgctcagtcagtcaacaggttctccaacacaggagtgaggattaaaaggaaaaaaagactagacaacattgtagtatgaccacagtcaattctgagactgaaggaaaatttaattttcccaatctgctctttataccattttaattacatgcaagtattaagggtgagcaggacaatgaggaactagaaagacaatagccaaggaacaagcaagataataaacagaaagccccatgatcactctgttgatagc

SEQ ID NO: 1147 - DNA, 2611 bp, Mus musculus
acagttttattccctgagaaaaagagatatcaggctgtgccttctcagacccctgctccctagaggatgaattaagggactaggaggcctactcatcagcatggagagatatttgccagtttcgaagaagcgcaactcatcctcctctttggaaaagataaccggctcagcaaatgggaatgggactctttactcagaggaagataccaacctggaggaaaatgacttcagctggggagactatttggaagagacaggtaccagagcggtgccacacgtgtccttcagacatgtggagatcagcattcggagtaacttccagccaggaatgaagttggaggtggccaacaagaacaatccagacacttactgggtggccacaatcatcaccacctgtggacagctgctgctcctgcgttactgtggttacggggaagaccgaagggctgacttctggtgtgacgtgatcatagcggatctgcaccctgtggggtggtgcacgcagaacaacaaggtgttgaggcctccggatgctatcaaagacaagtactcagactggacagacttcctcatccgtgaattgactggttctcggacagcccctgcaaaccttctggaagagctgcaggactcccagaatccctttcagtactggatagttagtgtgactgagaatgtcggtggaagattacgccttcgctatgtgggactggagcacaccgaatcctatgaccggtggttattttacttggattacagacttcgaccaattggttggtgtcaagaaaataaatacagaatggatccaccttcagaactttattatctgaagttgcctttcgagtggaaatgtgctctggaaaaagccctagttcttgctgcagagtctcctcttccaatggaagtatttaaggaccatgcagacttgcaaagccatttctttacagttgggatgcggctggagacattgcatataagcgatccttttcatatctaccctgcatcagtgaccaaggtttttaatagtaaatttttccaagtggccattgatgacctaagacctgaagctgataaacccacgatgctgtgccatgcagattctttggggattttgccagtacagtggtgccttaaaaacggagtcaacctcgctcctcccaaaggttactcaggccaggattttaactgggtggattaccacaagcagcgtcaggcagaagaagcacctcatttctgcttcaaaaatgcattttctcggggcttctcaaagaacatgaagcttgaagctgtgaaccctgtgaatccaggagaggtgtgcgtggccactgtggtcagtgtgaaagggcggttgttatggctccatttagaaggtctggagaccccaatgccagatatcatcgtggacatggactccatggatatcttccctgtgggctggtgtgaggccaattcttaccctctgaccacaccatataaagcatccttcggagccatcaatgccaagtactgctgcccacagctgttcgtcaaccaccggtgtttctcaggcccattcctgaacaaaggaaggatttcagagctacctcagtcagtggggcctggcatgtgtgtgctggtgctcaaagagattcttaccctcattaccaatgcagcctacaagcccgggagggtcctgagagaattacagctggtggaagacccagagtggaactcccaggaggagattctcaaggcaaaatacgggggcaaaacatacagggccgtggtcaagatcgtgcgaacagcagaccaagtgatgaatttctgccggcaagtttgtgccaagctggagtgctgtccaaatttactgagccctgtgttgatctctgaaacctgcccagagaactgttccgtccacaccaaaaccagatacacctattattatggaaaaagaagaagggtcattcagtcgtcacttagagtcagcaacatcgaaactccaccaaaatcaaccaggagaaggaaacgacggaaatcagtctatgtacagaagagacggaaatctgctatagtcgtcccagcagcacgtccctttgcctctcagaaaactgaacaggagaagcgagaaactctggacactgcaaggaagaaaactgggtaccatggtccggcttaccagacagacacctcagcagcacaggtgccctttgcccggccacgaagggctgtaaccctgaggagaaattccgaggctttgaagcgacctccagtggaaagggcacggagggtccgcacagtgccaactactgcttcttctaataacagagtcaagggtccacttgttagaattgtgaaaccagaggattcgagccaatcggatgaggagaaactgatacttgagagcaatcccctggagtggtcggtgacggatgtggtacgattcattaagctgactgactgtgcacctttggccaggatcttccaggagcaggacatcgacggccaggcactcctcctgctgactctcccgacagtgcaggagtgcatggagctgaaactgggacccgctatcaagttatgccatcagatcgagagagtgaaggtggctttctatgcccagtacgccagctaa

SEQ ID NO: 1148 - protein, 828 aa, Mus musculus
MERYLPVSKKRNSSSSLEKITGSANGNGTKEEDTNLEENDFSWGDYLEETGTRAVPHVSFRHVEISIRSNFQPGMKLEVANKNNPDTYWVATIITTCGQLLLLRYCGYGEDRRADFWCDVIIADLHPVGWCTQNNKVLRPPDAIKDKYSDWTDFLIRELTGSRTAPANLLEELQDSQNPFQYWIVSVTENVGGRLRLRYVGLEHTESYDRWLFYLDYRLRPIGWCQENKYRMDPPSELYYLKLPFEWKCALEKALVLAAESPLPMEVFKDHADLQSHFFTVGMRLETLHDPFHIYPASVTKVFNSKFFQVAIDDLRPEADKPTMLCHADSLGILPVQWCLKNGVNLAPPKGYSGQDFNWVDYHKQRQAEEAPHFCFKNAFSRGFSKNMKLEAVNPVNPGEVCVATVVSVKGRLLWLHLEGLETPMPDIIVDMDSMDIFPVGWCEANSYPLTTPYKASFGAINAKYCCPQLFVNHRCFSGPFLNKGRISELPQSVGPGMCVLVLKEILTLITNAAYKPGRVLRELQLVEDPEWNSQEEILKAKYGGKYAVVKIVRTADQVMNFCRQVCAKLECCPNLLSPVLISETCPENCSVHTKTRYTYYYGKRRRVIQSSLRVSNIETPPKSTRRRKRRKSVYVQKRRKSAIVVPAARPFASQKTEQEKRETLDTARKKTGYHGPAYQTDTSAAQVPFARPRRAVTLRRNSEALKRPPVERARRVRTVPTTASSNNRVKGPLVRIVKPEDSSQSDEEKLISNPLEWSVTDVVRFIKLTDCAPLARIFQEQDIDGQALLLLTLPTVQECMELKLGPAIKLCHQIERVKVAFYAQYAS

SEQ ID NO: 1149 - DNA, 238101 bp, Homo sapiens
tcattttataataaaaattatccaaccatttcaagtcatgttttcagagaatcttaatgacgcgagaaattccttctgtgtaatgcaaaatgaaaaaatggattggaattccgaattctctgtgaactaaacaacaacaacaaaatccacagagaaactatcaggaggagatactatagaaacataaaattgattatcactgagtattagaattacaagtgattttaatttctttctttataattttacttttcaagatttctaccaagagcatgtctatctcttataggaaggaaaaaactaaatgttgttgaaaaagtcaaagtgggacacatcgtttgcaaagtgaatcaattttgcagtcacctgggtggacgtagggggaagtcttccagtggcacggccattgccctccagagtcatgtgagctttcactctgctactgtttttttttttttttttgagacagagtctcgctctgttgcccaggctggagtgcagtagcgctatcttggctcaccacaacctccacctcctgggttcaagcgattctcctgcctcagcctcccgagtagctgggattatacgcacgtgccaccatgcccggctaatttttctattcttaatagagacagggtttcaccatgttggtcaggctggtctcaaactcctgacctcgtgatccacccgccttgggcttccaaagtgctgggattacaggcgtgagccaccacgcccagccactgtgctactctttcagtggctttcttgttggtctttgtattattactcttcagttttattgattgattgattgattgactgagtgagtcggagtctcactctgttgcccaggctggagtgcaatggtgcgatctcagctcactgcaaccttagcctctcaggttcaagtgattctcctgcctcagcctctcaagtagctgggatgacagacacgtgccaccaagccctgctaatttttgtatttttagtggagatggggtttcaccatgttggtcaggctagtctcgaactcctgacctcaggtgatccttctgcttcagcttcccaaagtgctgggattaccggcatgagccaacgcaccaggccttgagttctatttaaaatgattgatttgatgcatttaaattttacagtctcagattactgttctgtagtgtctagttagaggcaaatgggtaatgaggagtcataagacttgagcaaacttttccccttttaataagtgtctataagccactgacatttaactgatttattaatagccatattcatggacttttttttctttatagaaaaacttggtacatgactacatttttgaggcggaatgattttcctgaatttataaatgaatgaaaaaaagcaaatagtctttgtatgacacacgtaatagtttctaagatgtttctcctttgacattttccattgatataaaaatgcagctgatttaataaaaacctatgctgtgttaggaagtttgccgtgaatcatttgtggaatattagggggaaactgttaagtctccttttgaagtttcttagatttaaaaattcatgagttttaactagcttgacattattacattaaaacttttaagacagccaagaattgatggttgtttaggacatgttccaagccctcaaatacggctctccagtgcagtggcttgctgggctgcccaccttctacccacatgtgcctagttcaattcaaggtcattaaaattaaaattcaggtcctcaacagtactagatacgcttccagtgcactgtagccaacgtgtggctagtggttactgtactggaccaagcagatatagatcaggcagtgctggtctagatgcattcaacatagataatgagcccccagttatgtttggctagttgaagagtaatatctaatgcatgttctttctcactcgtgttcttcctaacaaggctttgcttagcctgtgctagcattactctattctttgactatacctcaagtgaaaggagaaggaaagatagggttgagaggggaggatgcttattgtattaaatttgcttcaaacataaagggataatctgaatgcagaaaatgtacaatgaatcataataacacctggattgataaaattttagatttgaaaggggtgattgcatctcatcaagctttctgattgaactgatgagaaattcaaggagtagagaggttaagtaatttgtttatgtcacacagccacatagcttgttattcccttattctgcaagctctctgttcttttcactggtccaagacaactcttgtaagaagttccagtactagaattctgttgtccaacagagacaaaaggagcctattatagtagagttaactttgtacaaaaccacaaagtgtattgtataaaacaggaagttaccttttataagcccagtcttctgaatgttttttgtattgtctttggaaaaaactgttactttaattaatagacacttttactttgttcttgaaattacgtatagcttaagaaacaaaaggaaatacgctttcttttaataatagcctttttggggggttagggtgttgtagttaggaaaaggctttttaaaaatatactgtttctattttgcaaagcttatgggtggagcagttgtcaccaccaagatttgcccctctaaccccccaaaaacatcccattgaatgtaaatagaaattcctgtgaagtgggttattattctcatatttgataggtttccccaagaattatctgtttccacagacactgcataggttccattagttgctgtggaaagtgaagtaatttattctaggaactgtgactgtgtgctgtgaaaagattgcattttgttaacataatttctacggcgttctgttgatggggcctctcaaatacttcttggacctgttcccttcatttcttctccactgtcttagttcacacccttgcctgcacttccatgtttttagtttgtttccattcatccatctcgcctatggctccctgagtgctttttctgaaacaaacctgatcatttcacttcctggaacaccctgccacatccactccatctgcagagtgacacgcagggctcgggcccttactgtagcaaacattctcttctcacctgggctcagcctgcctctctgttctcaccccaagtctttgttcagatatcacttcctgaggtcttgcctgactgtcatgtaaataattatcatccttctggtggggtgtggtggctcatgtctataatcctagcactttgggagccagaggcggacagatcacttgaggccaggagtttgagaccagcctggccaacatggtgaaattccgtctctactaaaatacaaaaaaaaaaaaaaaaaaaaaaattagctgggtatggtcaggtgcacctgtaatcccagctactcgggagactgaggcaggagaattgcttgaacctgggaggtggaggttgcagtgagccaagattgggccattgcactctagcctgggtgacaagagcaaatactccatctcaatcatcatcatcatcatcatcatcatcatcatcatcatcatcatccttctttgtttgcctgatcttttctgcttcatttttccctatagcacttatcaccatctaacaggctatatcacctactaattaaaaaaaaaaaaaactccattggctctttctcccaattaggatgagatctctaccagggcaggaattttttgttttgttttgttacagatgccttcgcatgcctggaacagtgcctgacatggaatgggggatcagtacatatttggggatgaatgggcgtgatgccgcttgctccacgttcctgtctcccaccctctcccttgaggcaccttagactttttcccaagggtctgccatgctgtttgctgctggtacctccacgtttaatggcttttctaccttttttttttttttttgaaacagagttgctctgtcgtccaggctggagtgcagtgggagccatctcaactcactgcaacctctgcctcccgggttcaagcaattcttctgcctcagcctcctgagtagctgggattacaggtgcacacgaccatacccagctaattggtttttttttttttttttcctatttttaatagagacagggtttcgccatgttggccaggctggtctcaaactcctggcctcaagtgatctgcccgcttcagcctcccaaagtgctgggattacagacgtgagccaccatgcccatcctcctttggtttcctcttatcctcggctcctctgggcatttcctcttgagcctctcctaattttctgttccgctttgatgcaccccccggcccacccaagctcgccttcctatccttgttgatatttgcatcttgtccttcgtgggattccaggtacattcttggtggacttggtggtggttatgtgtgcggttggacggacagacttgcttttagcagccacttgtccttgctggcagccactggtatttatatgtctgtccccagtgcccaacgtggtgtctggcataaataaatcagatgttccattaatacacacacaagaaaactgcatggtatcagcacttatctgtctggcattagttttaaaattgtatgtgtcttagaatttgctaagaaaagtttactgtaagctcttgaggaaagcttttcaggaggaattaatttggagaaaaatgctccatgcctaggagtgttgagtgctcacagatgacactgtgtggggtccctgccactccctagtttagttttatttcttttcattgccccttccccacaataggtgctcagttattaaaaatcgatgatttaagtaaaaatataaaagtcatagctgcattatgggaaatgtggataatgggggaaagggaactgtaattgactggttagggcgtggtttctggagccagttgtgtgggttcaaaccgcagccccaccactagcggctctgtgatgctgagcaggtgacttcatcccttaggttgcttatctgtaagatgggaacagtaatataacctacatcctagagttctgaggattaaataagtgcatgtttattatgtacttagtaatcactgtaagtgttggtaaaataaaatgatcgtaaatgcatgcttaccatgctaacacttccatttcttctctttggagcgacagaagctcctcctcttaccaacaggtttaggttcccaagactgctgagaagtccattcattttaactccaaatcacctaaccaatgaccagtgggttcacatacacagaatttttttttttgctccgactcctaggctggagtgcagtggcatgatatcagctcactgcaacctctgcctcctgggttcaagcaattcttgtgccacagcctcctaaatagctgggattacaggcatgtgccaccatgcctggctaatttttgtatttttagtagagatgggtttcaccacattggccaggctggtctcaaacacctggcctcaggtaatctgcccaccttggcctcccaaagctctgggattgcgaaccactcccctggcccacatacgcagaattttaattttttccccaccataataagcttctgtctcttctcactaggacactactattgcttttgtacttactggacaagatggagttgtgttctttaaatgtctcgaaagtaatcacatacccacaaaatacacacatacactcagcacagggaagccgtccctgagcatgagccatcctgagatggccaggctgaaatgtggattgtgaaacactgctcgctttttattattttttcctggattgtggttttgctcttatctatgaaagtttgaaatctgagagcttgtaaggagaggggcttttttttgttatgtttttttgagacagagtctctctcccccaggctggagtgcagtggcacgatctgggctcactgcaagctctgcctcccgggttcacgccattctcctgcctcagtctcctgagtagctgggactacaggtgcccaccaccacgcctggctaatttttttgtatttttagtagagacggggtttcaccatgttagccaggatggtctcgatctcctgacctcgtgatccgcccgcctcggcctcccaaagtgctgggattacaggcgtgagccactgtgcctggccagaagaggggctttcgtactggaatccctccctgccttagctcgtttgagtgttctccctgtgccctttccgtgcttgtactcctgtgtccatagctctaagcttttcatggagctgtgttttttgttatgatcattgtttttggggctccgtcatatgccttcaaggcccctttctcctggatacattctggcattttctcctccctttttcttccctggtttacctttgtttgctccaagtgtttcagttcctacctttttccttcagttgcacacccttctcccctccacattcccggtattttccctgagtgatcactggagggagagctgggagagctgagcattccacagtgggctgccaccctccgctctccaagcccatgccacctgtggcttctggagtctgtggatgctgtctctcttcctcagtgaccacgtgatcctgtcatctcataaccgcgcttccttacatggggtagaggtgaggggtggagggtgcatatcttaccctttgtaatattccaggtaccctctgaacattctcagtggacgcttgggtatttggttggatggacacacttgcttatcaacaagtagtttgtttacggagtgcctcagtgctcgctccctgcatgccaggggcaatccaggtgaactgggggtcctgctacccactgtaagctccaggtgtagcgcagaagaccttagagtgcccttggcaggcagcctttcctctgctgtgtgcagctcatgggaggaaatctctggaaccttctgagacaaggtgtgagcaggtcagttcggtgttaggtgatgtttagttctgtggccgccaatgcagtgggttgattgttgtgaaggaggtagttcctacgtccagatttttgtgcccctgtcatcacaggaatctggaaggattgctcttagaagaatgcagctctgtccatcattcggagggttcttttagcaaactgatacccacaggggtaaaatgtagccagcctccatagtaaattgctcagtttaccaatgtcctccgttaacaacaacagcaaaaatcttagaacccctccagctgttaaaaggttccttcatttagtgtcgattccagctaagctttcggaaactaagctcattacattgcagatgattcactggggatataagataacttcatttttttttattaaaaaaccgttattttcattattaaaaactgttaaaggatttcactatttaaaaaatttcattttcattatgaacgaagcaaactcagtttgtattttggttcaggtcgtttctgtagataccgtattttcttacactacctgccttagatttaggcatctagagggccacggttaagattgtgctcactcgcttcctccgaggtgccccagacggtgccacagtgagcacgtcatgtccatttctcttcagggatggtacttatttgtcctttctgtggttgattttttttttttttttttttttttttttttttgagatggagttttgctcttgttgcctaggctggagagcaatggcgcgatctcagctcaccacaacctccgcctcccgggttcaagcgattctcctgcctcagcttcccgagtagctgggattacagacatgtgccaccatgcctggctaatttttgtatttttagtagagatggggtttcaccgtattggtcaggctggtcttgaactcctaacctcagatgatctgcttgcctcagcctcccaaagtgctgggattacaggcatgagccaccgcactcagcctttctgtgattttaaaacaagctgaagaaactgtttaggacctagtacactgcattttacccatagctctcacactttaaatcaggaaagtcctggtttaagttacttgtatcactgatgttgacttctacgcctcaaaccttgtgcccttatttttgtctcagaaaacataaggccctgtgctgagaaagtgagggagcgataatctcgcattgacaggggccttctctgttgcactgtcattcccttggcttagtcaagaacttatctttgtagtagcaaaatgcctagattgctgtttgccgacccactccggatagttttatggttcattctccgaaacaggtattttctttctttgtactgtggttgagaagtagcttcctgtcctctccacagtgtctggtatagtacgttaaatacaacaggtggatagctcaatgcactttgaattaaatttcagtgctatgtacctggtacatttcccatctcttcctacttgttcctggcatgagtttccagctttttctctcccattgcacaaatgagtaacatgctctttcatgaacctcctgttttttgtttatttagagatgggggtctcaatacattgcccaggctgaccatgaactcctgagctcaaatgatcctcccgcctcagcctcccaagtagctgggatgacaggtgcaggtaggctacccactgcacctggcatgaatcttcaattttgacaaaacctccgaatgttttttaaaagatattttaccagtatgtgagtcacaaaatatcccattgatagatacaggtgcattatattcttttgtttcttcatctctactttcctgttggctgatttaaacttctctctatgtgtgacatagaacattgaatgaatgagagaaacaccatgtggtcgtggtggtttaaaaacaccatgtgagctgtgtctgagcatcggagccaggtatggctgctcgatggttaacgattactcctggtatctcctgggccctgacataaaggagctggagagtaggattctgtgggaaccagctctaatgttgctgctttttccagcagtcttattagaagacaagcggggaatagcagtgctatcgtagggaaagtcttgtctccatttctgctttgtgaaaaagcacattattgacaaacatcgatactttaactggttttggtaacagatcatgtgtaacacgtgaggacttcttcctgaggcagggcactgcgtgttgcagtacctgcgcgtgggatgctgaggttgtgtggggggtggaggttgctgctacatagcttcaaggcggggggagtgtcttaccaatgttgccatggtggatcgaggactgaaatgcaagtttctgttcgtgaaatatgtgtccatcttagtggtgataatgacctctagaacacggatggttttgctacgccgagacctttattgttgacctgtgtagagatgtactcattagtctttttaactaattaattaattttttttttgagacaaagcctcactctgtttcacaggctggagtgcagtggtgtgatctcagctcactgcaatctctgcctcccaggttcaagcgattctcctgcctcagcctcctgagtagctgtaattgcaggtgcatgccaccactcctgactcacttttgtattttcagtagagacagggtttcaccatgttggctagggtggtctcgaactcctgacctcaagtgatccacccacctcggtctcccaaagtgctaggattacaggcatgagccactgcacctggcctcagtgtactagaatacttattcctggtattttctattacaacattatgttgcatcttgaaagttataatgaaatggtagtggcactaataaggttttttttaaaaaaaattaaaaataagtgaatatagtcaatatgattaaactgctctgatttttttttttttgattgctcttaggtaattttttctgcaggatgaattaagagaagagacacttgctcatcaggcatggagagcactttgtcagcttccaatatgcaagacccttcatcttcacccttggaaaagtgtctcggctcagctaatggaaatggagaccttgattctggtaggattttgttttcgagattcatctggatttttgatgaattgatcaatatcttcctgaaagtattcaggaaacaatggggcaacatttgtagatctcacatactgtctggttcctgggatttgaagtcctatttataaggatatggccgctctaaaatttgggtcaagattcttattttgaatactagacagagaggactaggttatagtgcagcaacacatcacttcagaatctcagtggcctgggcaggaaacgtctacaaatcaccgtagcatggagtcgttgtgcaccatcctgcagggtttgttgtgagtgagaagagcagggttggaggtctcggaccagcagtcatctgctctggctcgcaagagacaaatgccatttttgctcagaaccccttgacaggaagttagttgcatgtttctgccacagcaagggaggttaggaaaaagaattccctcccaagtgctggagagagagagacaggacatccagatctgcctacgtagtagatgccgatgatacagcatctaatatgttgagcacatctgtcagaaaagcatacagtgtggaaggaagtgaggtcatgcggattggtggtgaagtgcgtctcccttccagaaatctgaaaaacagaacagctccctcctcggactcaaacacagccttcgattcaaatgtatgtatgtatgtatgtatgtatgtatgtatgtatgtatgtatgtgtgtatgtgtgtgtgtgtgttttgagacaggatctcacctgttgcccaggttggagtacggtggtgcaatcatggctcactgcagccttgacctcttgggcccaagtgatcttcccacctcagcctccacaatagctgggactacaggtgtgtcccactgtgcctgctgacttttaaattttttgtggagatggggtctcactgtgttgtccaggcttgtcttaaactactaggctcaagtgatcctcctgccttagcctcccaaagtgctgagattataagtgtgattcaccacacctagccttgattggattttaattatttaactaatgaagttataaatgcataaatgtatctttttctaaatacttacacaataaagggtttatttagaaaggatacctttaaaaaaaaaaagggttgcattgtttatacataccagcaaatgacttaaggacagtttagtcctctgagttgtaaacattagctatggtgaattcctataaaaaatgttgcgcattaagttagcaggtcacttgaccatggtccaaagaagtcacaaagtttgtcttcacattttgatgagactagtcaatgacagattacaggttgctccatatcattgaatttattagattaagtttatgaaattacatctttatatggaagaaaccctggaaaaccctcacatgagggaaggccttactgtgttgaagggcgttagtatctgtttccaaatcggctcatttgtccctctttcagatttttctacacataaaccagatgggagaagacttctcctgcaagtaaagctggatcattgttcctccctggaaacatggaaattattttctgagaaggcatagttgtataggctgaaagttcatcctaattattctactttatttaagtacagatttccctttttaaaaagtctttcctatgtttgctgagtgaagttatttttcaaattctggagttcctgagctttcagggtatttttgtagtatatcatctgcacacatccaacgtggattactgagttatttctcatgatatgttttggaaactgtttaaacaccaactgtgtattggcttttcatgtgcacacggttgcagtgtatctctctaacttaagtagtttctgaaactcattaatgataatctggtgtcgggaaaatgatttgtaccgacatttcattaagggtggctgtatggatggcaagtgtgagagcgagaatcattatatccttggctgggggagtccatgcagaaaacccatgtatactcatgttgtgattggttccttgctcttgcatcggggatggcctaaatcatacaggatgttcagatctttaatggaaatactatttctaaatggctctaaatgatcttaacatttttcagatattggctcagatttttctccacccccatgtggctaatctgtcctttcgccttgggatttctgtatttacttgtgcggtgaggagagttttagatgacgatacagactctttaaagaggacacacatttaaagcagagtctaagactttgcagaggacagtggctggattcacttgagaaactcaaatctagttttgagcattttcattccacaagtagcttattttttttttactaaaatctagttttgagcattcaaactattaagtatgattctacaagtagtttattattattttttccaatctgctaacccacaaaatatttccagtcctggaatcacttggtgagatatttggttctgggaccagctgggacaggtttggggctgttgcagagtcttagtgctgaaggtcttctcctgggaagcattttcagatgggacttactcatcccacgtacaggaggaggcaaacccagtgttctttagctggttctgaactgactcgcgatgataggtgtatgagttcagactgtgtggcaggcacagaaaatgttaagttctttgcgtgtgttaattcacctaatccttcaacagcccactggcattcaacagcccactggcatagctgcttttattgccccactttcacagatgaggagactggacgacaaggtgaagtgacttgagccctgtgttagaagcaagatttaatttcaggcattgtgaggctgtggagttggtgctctgaaaccctggggggcacctgccccttcaagtgcacagatgagtcatcaggaaatcccaacagcctcctacccacccatccatacactcacacccacactcacgcccaccccacagccacacacacccacactcacaccaccccacagcgacacacccacactcacaccaccccacagccacacacccaccccacagccacacacacccatgcacacacccgaccatccacccatccacacatacacccacacacacccacactcacacccatccatccacccatccatccactcaacccacactcacacccaccccacagccatacacacacacactcacacccatccatccacccatctatacatacacccccccacacactcatacccatctatccacccacccatccacacatacacccacacacacccacacttacacccatccatcacccatccacacatacacccacacacacccacactcacacccatccatccacccatccacacatacacccacacacacccacactcacacccatccatcacccatccacacatacacccacacacacccacactcacacccatccatccacccatccacacatacacccacacacacccacactcacacccatccatcacccatccacacgtacacccacacacacccacactcacacccatccatcacacatccacacatacacccacacacacccacactcacacccatccatccacccatccatccacccatccatacactcacacccacactcacacccatcatccacccatccatacactcacacacacccatccacatacacatgcacacacacactcacatccatccatccacccatccacacacacactcccacccattcacatacacccccacattcacacccacctcccccccacacacacaaccgccccccccacacaaaattttgggggtacagacacaacttagattctttgttgttctttcctactctttcctcccgtgccacctcccctgtgtcccgtgacacatttctacaggggttcccaaccccccggccacagattggtactggtccatgggctgttacgaactgggctgcaccacaggaggtgagtgtcaggtgagggagctgagtttcatctgtattgacagctgctccccattgctcacattactgcccgagcttcacctcctgtcagatcagcagcggcattagattctcataggagtgtgacccctattgtgaactgcatgtgccagggatctaggttgcacggtccttatgagaatctaatgcctgatgatctgtcactgtctcccatcacccccagatgggactgtctagttgcaggaaaacaagcccaggattcccactgattctatatcatggtgagttacagtattatttcattatatagtacaatgtaataataatagaaataaagtgcacaataaatgtaatgtgcttgaattgtcctgaaaccatcctcccatcccctgtatctgtggaaaaattgtcttctacaaaaccggtgcctaattgtcttccacaaaaccagtccctggtgccaaaaaggttggggaccactgtgttactgtctccctcgcaagtgactacactcaagtgactaaagtttttccttgagaaaattatgggatcgaagaaaggaaaatcaaacccgcttggggtgttttctctttttttttttttttttttttttttttgagatggagtctcgctctgtctcccaggctggagtgcaatggtgcgatctcggctcactgcaacctctgactccctggttcaagtgatcctcctgcctcagcctcccaagtagctgggactacaggtgcccgccaccatgcccagctaatttttgtatttttagtagagatggggtttcaccatgttagccaggacggtctcgatctcctgacctcgtgatttgcccgcctcggcctcccaagtgctgggattacaggcgtgagccaccacactcggccgggtgttttctcttatgtttgtttttttttttttttgccactgtccaccccgagatgctatgaggctatgattccttgcagtgatgcccccaagaaggaagacttcagctggcctcagtctcattaccaggctttttttttttttttttttttttttttttttgtgggagggccttttttttttttttttttgagacagagtcttgctctgtcacccaggctgcagtgcagtggtgtgatctccgctcactttaagctcctcctctcgggttcacgccattctcctgcctcagcctccgcagtagctgggattacaggtgcccaccaccacgcctggctaattttttgtgtttttagtagagacggagtttcaccatgtcagccaggatggtctcgatctcttgacctcgtgatccgcccacctcagcctcccaaagtgccgggactacagggtgggggaacctttttctaaggaaagctcaaatcacagttgagatcaataaccgacacccaagtcctgtaaatgaaataggcacaatataaaattactctttctcccaggaacactgaatatgtgattagaataagcccagggagaggaaatagctcaggatctgtggcctccccagcagacaccatagacagcatcatcccaggggacaccaagaaggaagtgtgcggaaattccaatgctgggattccaggtgttgtcagttgctgtgataaaagcaagcagaacaatatgctgacacagtgttcagtagattccttgacattctttttacaggcttgcgacgtgaaatttcctgatgaagtctatagataaagtggtgttgcacatttagacagggtgagcctcagtggagagaattatgctgaaaatgtgagcttgattcttcttcttggcatttggtattaactggagaaccacaggctcttctatttgggaaggaaaggaatcaacatttttcttagaaaaattcaggcctcactcttcacgctgggaactggtcctgtgtgactcaatggtattcccttttttccttaaccctcctttgaatagctgtggcttcccctggctaggtaatttgtgtgtgtgtgtgtgtgtgtgtgtgtgtgtgtgtgtgtgtgtgtgtgtggttttttcttttctcctagagtaactctggccatcgggtagttggatgagtcaggaggacctttgtgccgtgaggactgtccctgcctgtggggtggctctgcagttgtgagctcagattctaggcaggtggccacggttcctttctgagttgtttgcacagatgcttccaatgaatatactcatggtggaactaatttctaaatcttaggatagtattaaatgactatcagtatttacaagaagaaagacttaatgtcttctttctgtctctttccacattaaaaaaaatatctagcatctaagaaggtgctcagtaagcattcaccctgaatctgccaattcccggttcctttattggtgtagtgggcacaggctttaatattcagccttgtaaagtcagccttgtttcagattgtaaaattgtacaaacccaagattttattccttaaacaaagatgtatgggccgtttgtttattccatttttcactctcacgtcacttacactccagcttctagtaaggtatagtgaggtattctttttatgtttcttatgaaatattcttgcctcataaatagctttctgttttctaaaactggatcgctgctaatgaacactgttttcttttaaattgtgaaattttcttcgtagcttttcctagtcggttttcatgacatcatggggaaatacttcccactggttcatttacatggagggagattgtcagaatttccttgataaaatgtttatgggtttaagaggtttatgaatcagctataaatatttgctctgggtttatgagacctctccccataaacattttgtgtgtttttctattgctcattgaaatgtctttggagaatcagctccttggggcacataggcctggggaagggttgtacgtgacccattttaaaaggctgtattgtgaataaccgtaaattttgtgcttgactttgttataacgcacagttcaagtcatcagtgctgggcatgaaggtttgagtttttttaaatcccattctaggtctgacttttggttacctttttaagtgttttctttagaccagcagagagggacagagcttagtgttctactgattcctgcaggggagacacagtggcaccctctgacctcctggttaacttgactgaatgaaaccatgtgcactgaagtctgtagaaccctgtatattgggaaatgtagttgtaatgaattaaaatttgacagaaacaaaacttttggtaaaattctaatagtatagattagaattgtatggagaataaagaactgcaaccagcggtctcagtgttgaggctgaaaattggaggctctggtctcccctgatctgaagtgatagaatcatcgaatctttgtgggtaatgggatgggtcactaaagcctctcatcccaggtgctggtgactgcaggcagtttctgaggttccgcctcaatgtgcgtgtttccttttttttgttttgttttgttgagatggagtctcgctctgtgacccagtctagagtgtagtggcaccatctcagctcactgcagcctccacatcctgggttcaagtgattctcctgccccagcctcctgagtaactgagattataggtgcatgccaccacccctggctaattggtgtatttttagtagagatgggtttcaccatgttcaccaggctggtcttgaactcttgacctcaagtgatccaccttccttgccctcccaaagtgctgggattacaggatgagccactgcgcccagcctcgatttgcatgtttgtgatttgcaggaaggagtcacccaggacaacttgtcccgtttttcagcagctatcattctcggagtcctacgtagaaccttgtgcctccttcggcccaggactgagtttcatgccgatgtcttcttcccaggtgctcttcttcttcctcacacacaggttctgggagctcagtccactcttctcctcttcgcaggtggccacggcttcctgtgtcttcccttttcctgcttttttggctgtagactgtttcagggttcaccaacatggagagacagactcatcactttgaaacctctctaggattctgcaggagacacgggtggtggcagtggtggtttctggtgcatgatacaggtgggagaaggagggggaaagtacttcataagagctccagctttggactcctgaccctgatgctggacaacagtggctcagggtgattccctgtcctttctgagctctcaagattgcccctgtgagtatacatccatcatcgttcttgggaggattgtgaggcaatacctgtaaaccactgtttcattctgtttcgtgttcctataacagaatacccgagtctgcataatttataaagaaaaggtttattcaactcctgattctggtggctgcgaagtctatgacgggcagctgcatctggtgagggcctcaggctgttcccgctcttggcagaaagaggaaggggagcaggtgtgtgcagagagatcacatggaaagaggaagcaagagagtaaccagggtcttaacaacccactctcgagggaagtcatccattccttcaagagccagaactcacccctgagggaggacattaatctagtcatgagggatctgcccccatgacccagatagcccctgctagacctcagctcccagcactgccacattgggaatcagattgcaacatgacttttggtggggacagacgacattcaaatcatagcaagccttgtagcacagaagtgacactcgaacacagcagagctcttaggatgtgcctgggagggcggtggctgctttgtagagctggaagttactgacacaggctagggcaggcagggggctgcaggagggtctggttcaagctgaggccagacaaggaggatggaaagaagctctggactttgtctgcagcaagtttgctatccttagatactgcatcaggacgttggggcagagcaatagtgctgagctgacgcctctgactagtgcatcggaaagcaaatttggtaagaggtgcccagtgccgttgggaggcaggggactgtcaacagagccatcaggtaccaccctgaggtgttttccaggagacggctgctttctctctagttcacttcgctgtgtctgtgacgctctaaacttcttggtgtcatccattcttcactggaggctgcaggacctgttgacttattttctcaggaagtgcatttctgtttgaagggcgtcaatccctgggtgggaccgaatgttagagcaccaccaaggaaaggttttctctcctgatagctttttctttttcttttttggatgtttgactgtaagtcactttattgaagcaaaagttgaggaggccattctaagcaacttgggcttagaaggcaaaatttaaaatagcctttcaattcagctcttctgactttacaaaaatgatcctcttccctcaatttctgagagtacacaaagtattaagagagacttacttttcctacttataattcaaaaatttcaagaaggccgggcgtggcggctcacgcctgtaatcccagcactttgggaggctgaggagggagggtcacctgaggtcgggaattcgagaccagtctgcccaacatggcgaaaccccatctctactaaaattagctgggcgtggtggtgcaagcctgtaatcccagctactcaggaggctgaggcaggagaatcacttgaacctggggggtggaggttgtagtgagctgagatcgcgccactgcactccagcctggatgacagagcaagactccatctcaaaaaaaaaaaaaaaaaaaaaaaattacaggtggacaaaaagtagtgatagtctccagaagaaggcattcttatttggccccatgtcccctggcctatctgataggatcggatatcagttctctaccagccacaagatggaaagcagtatttactcttggccagtgacacaggctcttgtttctagaagataaatgggttgagcatcagcatccattggacattattgcaggaagatcatctaaacttttggaactctcgtgtgcattttggacagctctttctgttgtatgttcttatcatggccttgccaattggttcaaataatgtttacagcttattatttccatttaaaatgatgccatcacatttatgccgtgtatatgttaaaatgcattatttgatgctttttggctatacaagttttatcgtatatgtagccttaaatgtttggggaattgcttgatttccttcaagcctgggtgtgtggatttgtgaaattcaaatagttatgattctggccgggcatggtggctcatgtctgtaatcctagcactttgggaggctgaggcaggtggatcacctgaggttcagagttcgacaccagcctggccaacgtgtagtgaaactctgtctctactaaaaaatacaaaaatttgttgggcgtggtgatgcacgcctttagtcccagctacttaggaagctgaggcaggagaattgcttgaacccaggaggtggaggttgtagtgagccgagattgcaccactgcactccagcctgggtgacagagcaagactctgtctctcaaaaaaacaaaacaaaaaacaaaatacccccctacaaatagttacgattttaagagccatgttgtgcatttgattgtatttctctttattccttgtggttggagaaacacatgcactgttggtttctgccggagtgtcgggccccaacagctgtgtcccggcagtaggtaagagttgggagccttggactggccaggcatcgggagtgtcaggcagctggtcggtttgtgttgttgactggctgggtggccccacacactcgagcaattctttggggcctcattttctctttttccccttaaaatgatgccagagtcagtgctttatctttataacaattagtgctgttctctgtatacatcacagcctacatcacagcccttgctcagcgcacgatgggttccttcgccttgtcctccagcctccctgcaggctgggatgtctactgcagctaatttcaaactattacacgaacatgtagcaaatatgcgttggaacatgtctcatgttatttaccccagagaacccagtgttactcttgatttcatcagtgcagtcaaagcggaatgtcccatgttttcctttctttagtcaacacttctaaaatcagcagactgaagctttgcaaaaaattcagcaatatccttctgaactgtggaattagcttgtgtcttgtatgaaggattttctggtctcagttgcaggccagcacctttctgtcctccactccagtattgatattctgttcttttgtttttcaacagaagaaggctcaagcttggaggaaactggctttaactggggagaatatttggaagagacaggagcaagtgctgctccccacacatcattcaaacacgtatgtaaagcagcttgtgtcttctctgtgtctagaaagtgggaagggaaggaatctatagggagaagccggagaactcaatggaagaagggcagaggaaagagggaaattcgtggccaggcatggtggctcacacctgtaatcccagcactttgggaggctgaggctgagactggcaaatcacttgaattgaggagttcaagaccagcctgggaaacatggctaaatcccatccctacaaaaaatataaaaattagctgggtgtggtggtgcacgcctgtagtcccagctacttggggggccgaggtggggagggtcacttgagcccaggaggtggagattgcagtgagccaagattgcgccactgcaccccagcctgggtgatagagtgaaaccctgtctcaaacaaaaaggcaagatggaaattcagccaagatttcttaggaagaaggaggagacctggaagttagcttggtttccctggatagctacagggaatatagaccacaggtagggtcagcttgagtaagtaaagagctggaaaactaaaccagtaggtgtaatgtattcttagtaggtgtaatggctgtatgttttcagtttcaattaatattttgattttgaaaaagctcataaaagatttccagccatttattggcagatgagtcagattagaggaactaaccataaatatgatgaaaacatttggatccaaccaaaaaaaccactctcatcaataatgtttctttggataatgcaaatagcatgtccagcactgggcaagtcccagaaaatttttaaaaagtcagtttttatcaggttttcgctttggtgtaagatactggtaatgtataatatcattagcagggaaaagtctaactcacctgggttctaagaagttgggtcctggaaatttagtctttaatttttgttttaatagaaatagaaatggagatttaactctgagaaacatttttcactttgtccatgcagggcaaagattcagcctgagtttcatcagtaaatcggggcactttcttaacctgttcttccttttggctccttggctgaatgaagaagccagaactttgattccttatttttatttatttattttctgttagccaagtctcgccatgttgcctgagttggcctcgaactccaggctcaagctatcctcctacttcagcctctcgagtagctgagattacaggcatgcatcaccatgcccgatttgattccttattttaatacaacattttattctttttagaggtgaagtgttctttccaaaaggaatttaagatttttattaaatttctgtgaccctgaaaaggtagatcatgtttccatttctctttatactcatcatgctatatttactagtttattatgaacgtgattgtggctgtttagtaaaaccaagagctaaatattaaaacatagcaaagctttcaagcatatgatgtggttatggtcccgcaaaagccattgtaacatttatatcttaagatgctgagatgatttggcagttgccttaggcagtttaggaaagagacattgatcacaatttttccttcctttctgtactgagaagttatcaatttctctctgtatggagtcactcctattttctttgattcagtcaatcctcccacctcccttttaatcacaatatagtgtcctgggggccagagctggaggctgtccttcaggctgcagaagtccccaggtccgtatgccaggtttaaaggaaaagtagcctcagacccatgcaagtgtgattgataagtctgtcatctcctttcagcagtggccacttgcggacagcggatatgtcagctttgcaatgttaagacccaccaggctggaaagctttttctggggttgagggctggtagatatcaacagactatcacccttaattaaaaaacaactccattttctagggccatgttgttcatggaatagcccctatcatgtggtcctgtgagtccttgaaaaccgtgtagtccacattcagatgtgctctgagtgtagaatacacaccaggttttagaggctttattcaaaaagaagacagttggttgtttcattaatgttttttatattgattacatgttgaggtgataatgttttggatatattgggttaaaatatattgttagaattaaatttattcttttttgttcttaacgtggctggctgcaaatgtaaagtttagcattacgtttgtggcttccatagtgtattacttagataaatacatgcctgttttagagcaacaggaatattgtttgtaagtgccatattttttagtggtttttgtcatcttctggatgtattgtgtctagtgtagtaatgggttttctctatttctgattccttaaggttgaaatcagcattcagagcaacttccagccaggaatgaaattggaagtggctaataagaacaacccggacacgtactgggtggccacgatcattaccacgtgcgggcagctgctgcttctgcgctactgcggttacggggaggaccgcagggccgacttctggtgtgacgtagtcatcgcggatttgcaccccgtggggtggtgcacacagaacaacaaggtgttgatgccgccggacggtgagcccctgtttcaaaggcttcgatttacgagccgccatccttcatgacgcctgtaattttgcaaggagcagagagaaccttgcgtagaatccctaatggtcttagtgcaaaggtctcacagttctttcagagtggtttctcaggtttccttagctggagggagatcagtgcattttcagatgtcagagctggtgctgacaatggagccaaacttggcttttcggaactgaaagtatgcctaatccttaaattccttttggagggtaagaaaggaaggctgaaaggacatcaggaattggagggtaagaaaggaaggctgaaaggacatcaggagttgagggtaagaaaggaaggctgaaaggacatcaggagttgaggtcttgtgtttggtgattggccatgttgcttttcttctgctttagcaagtcgacatttgaacagtaacagagtgtcttaagcaggcttctctaataacttttcatctgtcttgttgggagactgtcagggtgtcaagcttttagaaaaccatacagcacttgtgccctaaaacttaaggtataattaaaaaaaaaaaaagaaagaaagaaaaccatacagatgagagaaatgacattggtctcaagggagtggtcaaagcccatatagatatgatcaatttagttgctacaaagccactattctctccgggggcagttttaccccccaggggacacctggcaatatctggaggcatttttggtcagggccatgggagttgctactaccatttagtgggtggaggccagcgatgatgctaaacccccgcaatgcacaggacagccccataaccaataattaccaggctcagcctgccagcagtgctgagggggagaaagcctgctggaaaagaatgggctggacatgataaatgcattgaaggaattcatctgatcccctaagtgagaaaactgagggcagctaattacgtgaatctctacaccccactctctatgttttattgtatgataatggcagcagcgatacttgcaggctcttgatgccaccttgcaaatgtgtgtggtgtcctcttcgtagctagctgcctgttttcatcttgaagtgacgtataaacttggagaggtgaaatccccaggttcattctgtttgtggtattagcagttgccttacttagcctttcacggtatcggagctctatctttttttttttttttttgttatgatatattgtttttctgataatttggaatagcctgtggttttttaattaccctttgttaggtgtaattgatagcctgctaagaagggggtcataaaatggctggagttaagagttgcatttatgtgacatttgtcaggatcgaacccattgccatggcgttagctgacattttgaccctttattgtctccaaagaaagagaaaaagggtcttctttctttctttcctgcattgggtctttgcacccgctctttcctatgctgagaacctccttcctttccgcatcctcctcctgctccagctgtcagcatagctccctcttccacctgcaccaaggttgacactgtctgtgctcatgggccaggtcacaccctatctgcaccacgtggctgcctgcgccttcagtgttcatcacggttgcagttgtactattcttttcttttcttttttaagatctaattgacgtgccataaaactcaccactttaaagtgtacagttcagtgattttttagtatattcacaaggttgtgcaaccattattactataattccagaacatttcttttatcacctccaaagtcactccccattctccccctccccggaaaacccttggcaaacactaatgcactttctgtttctgtagattttcctattctgggcattttacatgcatggaatcctatgctgtgtggccttttgtgtttggtttattctcttaagcatagtgtcctcagggctcatccccatggtagcttgtgtcagaatttctttcctttttaaggctgaatcatattctctggcatggactgatcatattttgttctcccttcatcagtgggtggacatttagaggcagctgttcttccacttgggtggttctttgaatggagtacactttatccccccagacagtaagctgcatggtgtgaacccactcgtctgtgtacaccagctctagcacgtgctgcctgtgcttgaggaattctcagtaaagattcactgagtaatcgagtgatttactgaagaaggtaaaagtgcggcttacatggtcatctgaaatagcaaggaaaagaacagtcattgttacgaaaggaggaagcacgtgcgctctccttcacctttcctccttgagctgccagtagtgctgtgtgcaccttctctctggacatgcgagcctggatttccagcctctctattcaggtgagtgctggagaatggctgttcttaagtcaggttttatttttagttcccgctccagctctgtgtacgcaaatcgcagggtcaggaggcacaccctgggaggcacagtgcatgctcatgcttttggtaacatctgattcactcagccccagacccagcctaaacaggtcctgagggagattgttagatctgcctttgaattaaaacctccactgaggtgagaagctgtggtgtaacgtttgattaatttacctatgatttctgatccgtcgtgaagtaaatcagccttgatggaggaattgtactgatggaatattgaggaaatgccaggtctagttagagatttagagaccttcccccatccccaactctgcacgcaggtgccacacatttgtgccccctcacactcaggggagttgcgttcatgccgggggccgtgtacacacttgggggcatcaagagaagggcacacagagggggcacatagagtgggtgggagcctcaggccccatccttgttgccgacggttttaccatcacattcatgactcactcttcaagtttaacacttgaatcttgaaagccccttggaaaggatgtaagatggtttcattttgtaatagcttctctagtgaatagttttagagacaagttctggggtcttgaatctgaatactctaagagctaatgggttcatttggtaaaaatgtatgctgttgcttgagaaagagggcagagtttattaatcaattcttccttctccctcagaagacaaatgtggcagcagtcacacacactctcagaaacaccatcaaatttgtatcctactgactttgccacagtcacacttaaaatgacaagttcaaaaagaaaaatgagaacaccctggaaaaagggaaaccataaatgtgatggaaatacttaaagtcttttcaattgttaacaacttatgctaatttgaggaattcttcagtgatattttttaaagaactcaaaaacatttagtgggtaatcagtatgacttggaaatctttaatatggagagcagagtcaggaaatagcaggttcatggggcaagaagttttattgatcgctgtaggacagaataattattgctttgtagccagaggcggcagttgttccggagggaacagtagaatctattttttaaacaaggattcttatttgtgtgtttttttttctgtcttagagacctgatatcattgtaaattctgcaaccatacctggtcgatctttgctgtggttaaacttgaaaggcaccgcagaatatgaacaggagttacagcgatccagggtgtatgatgtttctgtttgggaggcttcttggtgagacggagattttcttactgattccaggagtcagagtggtataaagggaggggcctgtggctgcagcccaagatctgagttcttatcttgcctttgctattaacttagctccatgggtgagtccccttcttggggttctcatctttgcatgaggggggtattagtctgttctcacactgctaataaagacatacctgagactggtaatttataaagaaaaagaggtttaggcagggtgtggtggctcacgcctgtaatcacagcactttgggaggccgatgcgggcggatcacgaggtcaggcgttcgagacaagcctggccaacatggtgaaactccgtctctactaaaaatacaaaattagctgggcgtggtggcgcatgcctgtaatcccagctactcggcaggctgaggcaggagaattgtttgaacccgggaggcaaaggttgccgtgagccgagatcgcgccactgcactccagcctgggcaacagggcgagactccatctaaaaaaaaaaaaagaggaggtttaatggagtcacagttccacatggctggggaggcctcacagtcatggtagaaggcaaattagaaatgaggagcaaaggcacgtcttacatggtggcaggcaagagagcctgtgcaggggaatttccctttataaaaccatcagatctcttgagacttactatcctgagaatagcgtgggaaaaacccgccccatgattctgttaccacccactgggtccctcccacaacatgtggggaattatgggagctacaaatcaagatgagatttgggaggggacactgccaaaccatatcaagggggttgtggtatagaatctctaaagagctttctagtctgaaatgtctaggtttgtgacccttgtgaaggaagaaaggaaggagggtttgggtgctagttttcctatataatgcacgaggaatggagtttagtttggagttaagatccatggacgtctagcccaggaatctgtccaaagcacagacatcaagtttgtgaattactgttggaggtgatgacagtttaacagattgtgagacactgtcattaggtcagcaagttacggtgtatgcctgggtagaattttcccccataaagaattgtagaccccagttccccattggaaccagagaactgagagtttttagcccttagctgagtaatcagcggaagctgagtcaagtcagttggttgtggataacagcctgggaatgtttgggaattttgcccttgtttcatgggggaagggagagaatgcctttccttgtcagatggaggttgcagagctccagatcttcgaggacactttgggattgtccaaagtagttttctagtaactggagtcactgcattgaaagaaagtggttttattatcttagatgatagttttacagagcacttaggaccctgtgcagtcccatgttttcttgcatggctcttttaaattaatgtaagctgtgaattaatgcaagccatcattagtctgtgaaatggtacaaggaaggagaaacagcatggcggcagctccaggagatgtcatcactaggggattcccatcagcaggcagagctccattaataaagacgcatttagagacctgggctctgtgaccaatcggccgttcagagcagcgttcctgcttgtgagctaatcagggctaatctttcatattaaaagtattaaggaacatatgacattaaagcgtcacccagtgccgcggaggattatggctcttattagtggagcaaaatgtaaaacgttttggtttagtaaatctataaggcttgatttattcataagcgcatgcaatgcttgcaaggggcagctgccaaataattattgtttatggtgagaatgtatggaaatcatttaatccagtgacgacttcattgttatttattgaaaagcagtgacattacctcttaatgtctggggctggggagctttggagatttagtcggtgcctgccgagcccccaaaaagatgctcgtggaagattgcaggtaagtatgtgtgatgatgtggctccaaataacaccccttggcttgtaaatggagacgtatttatgagtgctttctactgttgccataaaagtgttggaattatagtgccttaggagtcatgctgctaatttttattttccccgttattaaaatttctgtcatttgaattgcgtactctgcagtcttggcagaattactcaatttaccattcaaagttaaatcaaaattagtggagttagttaatatacaactcatttgaataaaggaatgtttattcatgaagtgtgaggagaaagtgtgaagatggccttatgtttatgtgggcagctcctgccaagttttaaagcctggttttaggaacgtttttgggaattgccatttttactgtagttgattgtagaggacaagatgctggcaggtggcacatgggacaggaaagtgactagacaagcaggacttacccagctgtgacatggctcaactgtggactccaaaaagtagaattaggttgtgtttttatgagactgaccctttttaaaatttatattttataatgtaaatgacatttcagtaatattaagggaacttaaacaatcacattattttctttggttatctgacattgtaactggagttccatttgtttatcaataagaaaatttagtatatatgctaaaaactcataatgaatcctaactgggcacccaggcttgagggaagcagagagacactcattaaatattagatagcttagtaataagagagcagaacacattggtataagaaagggtaggattatttgacaagtatgtctgtaaataaaccaaaagtcatagttagatattttattaaaaaatgtttaaatattctaaaagttttaaataaatattttaaaaagtgagttagtattgtattgtcaaaaagccatttttgatgatggtgtgtgaaagagggaacattcaggtaggaaacaaagtaaccctttctcaataggcactgaatggaccttttacaacaattcccatggttttgaattctatctgatcaagtagagagtctgtgtacacattcatcatggtgtagaccaggatgggcttggcttgtagatgtgtgtgacagagagagtaggtatgtatgtgtttgtaacttttggtgtaaacagtatttaattttaatatctatcatttacacatcacatcataaaagagtcctgctgtgaatcaaaacccttcatataggtaatggcaaataactctttgtttatgagtaaaaaatgaatagtttttttttccccccagaaatccgtgtttggtgtttgtatttgtttttcactactcacaatatgccacacactctcttttttatttttatttttttgagacagggtctcattctgtcttccagtctggaatgtagtggcgtaattttggctcactgcaacctctgcctcccggggtcaagctatccttctacctcagcctcatgagtagctggaactacaggcacgcaccaccatgcctagctaattttgtattttcgtagagatgggggtcttcctgtgttgcccaggctagtctcgaattcctgagctcaaatgatctttccaccttggcctcccagagtgctggggttacaggcgtgagccagtgtgcctggccccacacactctctttggtcatcttgaacagtgaatgaatgaatcacgaatttcattctgtttgtgtcatagctctccaattagaagatacttttgtgtgcacctcctgtggtaccaggtaacgacgtttaatcctgtcaatcctcagaacatccttttgaagtggctggtattattcttatttcatagttgaagaaagtgtgtttgttcccagatcaggcagtttgaagtagattttaagctaagaggattctggccagttctgaaatcgatgctttgaaaatagcaggaggtctgtaaatatttgtttattgattagattatatcattaagactttagattaaaatggtcagactgaatatcactgagaaaagttgtagagttggtttcttggtgatttttaagagtagggtagaaagctgctgtccagaatattttccaatttgtcttttttggcggcaaataagtggaagagatgtggtctggaagttctttgccgaatggtaaccatgagattatgtaaagttatgtaaattgcatcagatgctatttgggtttttctgcgctacatgaaaaccgtaagcatgaagcagtgactagaaggttttcctttttagtgctagtcataaatgaatttattttctcctgcttctcaacccagcaacatatgtaatttaagtcaagcatgtgtttgattctgagtggaattcgaggggggagttggtgctgtgtgtttccatggcctcgtggctcatttttgcttccgtgttaactccttcacttccataattgtcagagcctccaactcatctggcctctccctcccttggtgccccacctccccttgtaaggatcctggccctggcctgctccagatgcagctcagatgatcacggcctcgggtgcatggagggctcagctcccatctggccccgttcctgctctgggtggacctttgaacgtcctgaatgatccttgggtttcacttgtatgggaagccccgtggcagctttacacagacaaggcccccgggcacagctcggcctgcaggatgtctggctgctccaggcttgaccctgcctcgttgacctccctttattccccctccacctccacctgttcactcttcttcgtgccactgaccgtcctctagtttgttggactggggagcttctcccactgtgctcgcagctctggcctcctatccaagcctctgactcccctgctgcttcttattaagtcttctctcatggctccatatttcagggcatacctccattctagggccatgcagatgttctagggacatgctgatgtcccaggggtatgcagatgttctagggccatgcctccattgcagggccaccatgcctccattccagggccaccatgcctccattccagggccatgcagatgttctagggccatgctgatgtctcagggccatgcagatgttcaagagccatgccttcattccagagccaccatgcctccattccagggccaagtagatgttctagcgccatgctgatgtcccagggccatgctgatgttctagagccgtgcctccattccagggccatgcagatgttctagggccatgcagatgttctagaaccatgcctcccttccatggccatacagatgttctcgggccatgcctctgttccagggccatgcaggtgttctagggccatgccggtgttctagggcaatgcctccattccagggccatgcagatgttctagggccatgcagatgttctagggccatgttgatgtcacagggccatgcagatgttctagggccatgcagatgttctagggccatgttgatgtcacagggccatgcagatgttctagggccatgcagatgttccatggccatgcagatgttctagggccatgttgatgtcacagggccatgcaggtgttctagggccatgcaggtgttctagggcagtgcctccattccagggccatgcagatgttctagggccatgttgaggtcacagggccatgcagatgttccagggccatgttgatgtcacagggccatgcagatgttctagggccatggtgatgtcacagggccatgcagatgttctaggcccatgcagatgttctagggccatgttgatgtcactgggccatgcagatgttctagggccatgttgatgtcacagggccatgcaggtgttctagagccatgcctccattcattccggggccatgctgatgtcccagggccatgctgggttccactgggtttcactccagggctgtgccaacattccagagccataccaacggtcgtgcctccaactcgagtccttaggttctgccggtcattagggagagtctgcctttttgagcctggctctcagggaatggttggtttgtgcaaagcttgtctcctgagtctagaatcatgttaaagcttggtgagtacgaccttcagttcaaagtcttgggaacttagatggttcccaaggattattcagaggttaatttggaattgttttagtcagggttttccagagaaatagacctgatagggtcagtacatacatagcaagaaattttatgtttaggaacatgtgattgtggatgaccagtgagcccaaaatctgatggggaagatctgtaggctggaaacttaggaaagagctgcagtttgagtctgaagcagggggagccagtgttgcagatgaagtccgaaggctgcctgctggagaatcccctcgggctttggggaggtcagcctttcaatctatttgggccttcgactgatttgatgaggcccacccacaagcaagaggatgatctgctggtcagtgtgtacttatttaaatgttagtcgcatccaacaacaccttcacagaaccacccagagtaatgtgtgaccagatgtcttgtctgggcaccgtggcccagccaagttgatgcataaaattaaccctgccaggcgtggattcagagctagagctgaatcgcccacttgctctcccctggcgtcatcttaatgccttctggagaggcagaacattttgtgtacacttggaatcactgtgctactttgccctaacagacaatgttcagttgatatttctgaatatagatgcccttaacagaaagctctggtaggaattcgagagattgcgaagtaaatgcatggattatctttaatgctgtgaaagtataaatgtcagagtggcaggtcagagagtctcttgaaaaccaatacgaagtgggtaggaagaagaggcagagacatttcacccactttttaggctcactgcctgctgctcagcagggccaccatgatttatctgaattctgtgtcaatttccataactgcatatcactctacaggtacccactgggattacttacaagggattttgctaatgaggatgtacttccgggtacagggttctgtggcatgcatttaaaaaggcagtagctggctgggcgccgtggctcacacctgtaatgtaattccagcactttgggaagccaaggagggaggatcacttgaggccaggagtttaagaccagcctggccaacatggtgaaatgctgtctctattaaaaatacaaaaattagccaggcgtggtggcacatgcctgtaatccctacttgggaggctgaggcaggagagttgcttgaacccgggaggcggaggttgcagtgagccaagatcatgccactgcactccatcctgggtgagggagcgagactccatctcaaacaaaacaaaacaaaacaaaacaacaacaacaacaaaacgcagtagctagtgtgccttcatcatgggttgccttgaactcctttgaaatcctgcatcttaatcactatatggcctgtcctcaaccccaggaaaaaaacgaacacatgagcagcctttgaggttagcattacacttccacgaggatgagaggggcctccagcctggggtgtgccttttagagaacgcagagaatcacatgcacagacaaccatgtgtattcaagagtacggagatgcctctccctcggatcctgttttcaggactggtctccagcaccctgtacctacacatcaggctcaaatggagaaattctctgcatctcttgtgcccttgggaaaaaagacctgtgtccgaatgctgtgattttgtgagttgtggtgttgccactgtcagagtaagagataaattaatggtcaaattacttctttcagaaagcacaaatataataaattttttacagagtgaagaatcactttgcaatagttctgagcagtttctattctggaagaaattagtacagaatttccaacagttgtatacattgactggggcttcattatttatttatttatttatttttgagacagagttgcaccttgtcgcccaggctggagagcagtggctctatctcggcttactgcagcctctgcctcctgggttcaagcagttctctgcctcagccttctgaataactgggattacaggcgcccgccaccacgcccagctaatttttttgtatttttaatagagaaggggtttcactatcttagccaggctggtcttgaactcctgatcttgtgatccagccgcctcggcctcccaaagggctggggttacagacatgaacaaaattaactttgttttacaaaatgaaaatgaaatattttaccatacaaattcacactgttctcacatatgggaatctggaaccctagacgtgacatggatgaagccgatgttgactttttacattggcaactgagtgaatgttgaatgctagaactgtggatagttttatttctttataaacatgcttaatgagattcagtgctgaaaaaatagataaaatatttaattttattttaatattttaaattaaaatgtttgatattcactaattttaatttgcatttccctattaattttagtagacactttagaaagagtaggaggacatttggaatcgtaggacacttagaaggaaaatagcatttttgaacaaaatgattaaaaaatttgaatttagcattttcttcagtttacgtattttgatgaaaagaattaagatgaagtagactgggtatagtgatattttatcttttaatctgttaggtgatttctgtgactagaacataaattatgtgaaaatctagatttttaactaaatagttaattttgctgaaaggaaggccaaatagataaagataaaatcatttatgacttacgtctttatctgattactcatccaaacattgctggcccatcagcagaacacccagactcatgttctcataattgaatttagtcatctctggcttttggccaactttctgtcttctgtgctctagtgcttttccagactttttgattgacattatgaagatatatttgtcagtgaaggaggacagggcatactttacttaaaagcctgtttgcttgattaataacttgtaaatcttaaacatgtgctacgtgagctacatttgtatttgcacttggtgtgtctgggcctgttttagggttcagatacagcccctgtgaactagaagtctttctaaggatgatttgggcacgcgtggatttagggagccagtttctacatccaccaggcctgtctcttccatgagactgatctgcctgagaatagaccagtgccgtcctttcccacctgtcccgtcttctctcccactctttcctctcctacgttggttgagaaggatgtcaccaactgaggtatcgagatctcatgcccactatgccagccgtgacatgcagacacaccagtttatctttttatgtttactcatgacactgccacgttattcgtgttattttgatcaagactaatgacaattttaatcatctaagccaaaagaaaatttttctcttatggtcaaagaaattttttaaaaagttgaattatatactgcctactttttgttgttgttgcagagaaattggataggataaacaatacgagactgttgggataagagtctggggcatataggctgctgttaaagtagtacttatgtatatttttatttatttatttttttgttttatttatatttttttttttttggagagggagtctcgctctgtcacccaggctggagtgcagtagcgtgatctcggctcactgcaacctccaactcccgggttcgagcgattctcctgcctcagcctcccaagtagctgagattacacgcacgcaccaccacacccagctaattttttgtatatttagtagagaaagggtttcactatgttgcacaggctggtctcgaactgctgacctcaggtgatccgcctacctcggcctcccaaagtgctgggattataggcatgagccactgtgcctggcctattatgtataattttaaatgtaggatggaaggtatcagatcatttactgaatatatttatgggagtaatataggagttttattccaaatgtcagagttgcagtacacaggaaattacatcctttgtgatgattgaaatgaatgaaacatttctcaacgccaaattgaaaatgcatgatgggaggacatgagttcttcaagattcttgtatggggggtatatgaacaagaaagcttgaggaccagttttcacaaatggtactcaaccatagcccttctcatttacccattaagatgtttttttttttttttctttatgatttagatgcttagatgttcttagggctttggaaggatttatcataattgagcatttgctgagtttctgtttccgtcattggattcctttggtaatatatttgcaagtctttctctgagttctttgctaataggaaaacaagagctgacaggaagatcttgggtggatgggtaaaaatggctactggctgttgatttggtccactgtatcaccacattactgttgacatagtaatggaaacactttaatatcaatcagtgcatattggggttctattctgtgcctggtgttttttgggtgggaatatatgatacggttgttattaagcattttatattgaagcacactggtaatatagtcaacttttggccaatagtgtgtactcagtgatgaactcaattttggcaaagggtgtcttctgtggtggcccccagtgtacttattttatttatttatttatttatttttatttattttgagatggagtctcactgtgtcacccaggctggagtgtagtggcacgatctcggctcactgcaagccccacctcctgggttcacaccattctcctgcctcacctcccgagtagctggaactacaggtgcccaccatcacgcctggctaatttttagtatttttagtagagacagggtttcaccatgttagccaggatagtcttgatctcctgaccttgtgatctgcctgccccggcctcccaaagtgctgggattacaggcgtgagccaccacgcccggccccagtgtacttatttatttgttggccatttctgccctgctgttgactgtttcactccttggcttagcaagaggtgttgggagctgatttgaaactctaatctctggaggcatggggaatatgactcctctattctgggtggggacttctctgagatagcatttcttttcttttgagtttaaaaatgtgtctgtctaagcctgggcaacatagcaagacaccatttctaagaaaaaaaaaattaaccaggtgtggtggtgcatgcctgtagtcccagctactcaggaggctgaagcaggaggactgcttgagctcaggaggtcgaggctgcagtgagctgtgattgcaccactgtactcccacctgggtgacagagtgagaccctgtctcaaaatatctttatgctatacatttttagaggtctgttcaacagctatggaaacttccaagagccaggcactgacctgaccctggcacctggagcgtcccttctgggagaatccgcctgtggatgaatagaaaggcccctgctctctgctggtattgaaataaaacactggcatctctggaactgagttatgtctagtaagtggctcctccgaccagtatacggggtgggaagtgttggtgtgagtcacctggcctgagctagggcctcaggcctgcctagcactgaaaggagcccagaaaaaagcgacttcagaaaaaagcgacttcatctgcttgcatcacactgtcctcatcttcaccgtgacaaactgacacaatcttgctctcggtttgatggcaaacgctctctgtaacctgtcatgtggaaagttccctcctcatcagatatatatatatatatttttttttttacaggtaagaggctttaataggccttgacaaagggccgtatgagtggagaagtatctgcgccctaatagcagggcacttgaaatacagccacacgggtacagtgtctttcccttagccagtagctcctcactcggccacgtccactgtccagaatactgtcgaagagttgcctttttaccccctgtgagctcagagaattttgatcatacttgcctgtgctatataattgtttatgtataactgatctcagccatttgcttatgaaagtaaggctgcgtgaatgttttgttttcagaaatacacattttggatcctaatgccaccacttaattaaacgtgcgaacctgggctaggtattttctctctcaactttgtgacctgcagtattcccatatgtaaactggagataatgagacctgccttacaggatcgttttgtgcattaaatgggatttgtgtaaactccttagagcagtgctaagaatgaaggtggtaatgagaaatgcagtttttatccatcctcattcttctggttaaggatggtattttattcaccttttgatttcttataatgccttgcacatagttaaagctcagcagttgttaaatgaataaggaacaaagcccccatgaaaaaacaacaacacacaaaactaattagtactagtgtatgtgtgttattcactggagagccttttcaaatcctaccacattcagagacaacaatcacattacttgattttgaagcccagcacatgttggaagcagaaaattagaagcatgagaagacagctgttagtcatgcatattgatatcacaaataaatcctagtgggccacccaattgcaaggaaggaggtagaggagctgggaaaagtggtatcaacagtagagcaatctaatgccttttaccagaggagcggatagccccatccacagatccagagggtgtgtggctactaccaagggaattgccagccattgcatagtaaagcagcataattgatttatggcactcaatcctccaaaaagttgtaaatttctttggtgtctaccaagtaggtggcaacagcaaaggctaacctcagggggatttgcacaggaggaaaaacaagattgtaaaaacctgctgttctaggagttgaaatgtattattattatggctatggtagaactcttctcttctttgtcatgcagacttaaagtataaaacagtctttattccagcttgttaaaagtgggaatgccgtaaaccaacacagtgagcctggagcaatgacaagctacacaaaaattaaacatatttgtatttcaagatgtagcgagctgtcgtggccagttcatggccactttgggaagacatttattaggaggaagcaagatggcactaaagcgtgggagaggacagaagctggagccgtcatgggtgcagaataaggctggcccggaagagtggctgggtggggtcacacctggtagttcagatatcttttgctatcgattttctaattttctaagatgaagtgttaatgtcccagcgtgtggatggtgcctccggatggacaattcaggttgcatgccccagacctcgtgattgggactggccagaacagacaagaccccatcagcaggatggacaagaccccatcagcgggatggaccccatggaaaaaaaaaaaatctaggaactaagacacgattgggcaggaggctgggaaacttactaggaaggatcaaggttgactttgccaccatgacctagccacgaacacgatgggaagaaggctgtggagtggggctgtgggcagtgcctcccggggccctgaatgaagcaagcttggagagggagctggtgtgtgggtctgagtggcttctttaatgtcagcatgcgcctatgaggtgctgacgtagccttattgcctctttgagagttggcttcccatagggacatcctagacactggaagatttttgcatcggcatcttcagtccatcaaatactgtccttgaaatcccactgtcctcagttggtgatggacaggggacagacatttgtggtctcatgctgagggtcttaggaaggcaagaggtggataaaagagtcagggattgagggccgggcacggtggctcacacctgtaatcccagcactttgggaggccgagacaggcagatcaccctaggtcaggagtttgagaccagcctgcccaatatggcaaaaccccgtctccattaaaaatacaaaaaattagctgggtgtggtggcgggcacctgtaatcctagctagtcgagaggctgaggcaggagaattgcatgaacctgggaggtggaggttgcagtgaactgagatcatgccactgcactccagcctgggagacaagagcaaaactccgtctcccccccgcaaaaaaaaaaaaaaaaaaaaaaaaaaaagaaaagaaaagaaaaaagagtcagggcttgaaagtgagaggatccaaactgcatcctgtcctgcccacagggtgttctgtccaccttaagtttgacatggtggttctgaaccaagcctgagactgtgttgggatgaaattcctgggggctgtagagttgggcagtctgtgctgagcattccatcacacgtgccattccacaccatttggagatcgagcagaacaggtttgattgatgccgggtcattttgttttagatcattttcacatttatgatctctgggattatggaagaggtctgtgattcttgtgatttcaagagaggggatttaaaaatggatagggaggtttgtcacagattcatgagacctgggagtgagaaggaaagcggagtcagagaggtggagaatgggtgggtgaccatccttgacctgggatctctgtgaccaggactctctccatttctcatccaaatgtcctttttggaggtctcatccttgtcatggtggtgacaagacatggaacttaccacttctgaggacttgaacaccctgagagcctgaggctgcagaaatgaccgtggcaggttccctgccattcacggaaactgaaatgtgccaaagagcttatatccaagccaaacagcgtttgtattggagaagttgcctttctctcaaaaaggatggataggaagcagtttttaaaaaaaatctgcctgctttctgaagatgaacacaaatctggttacatccaacagaagatagaatgattatacaacatgaggcttaaatgtttgtcttttaaaatgttcttaggttatgcagcaagagtttacagtagccaacctgtatttccaaggagatttaatcagaggaagtatcaaagaattgaagattagtatgattttgaaggttttcctaattatttttctgatgatctcttctcaactaacagagctggtaagtagagttgattaaacaatgtcaattttttgaaaagcccttaatgacatatttacacagtagttatgaagagccccccaaagcccatcatggattataggagcaagttatagccattaaaaccatctgtgattattttttcgtagtagagagtgatgtcaagccatcagcttctgttcaacatatttcttagaaaaggatgtctcaaaacttcttcgagaccgtcacgaaatgaaacaactccccgatcccacacgaacctctcccaccaccctcaaacataaaccaacccaaaccctttgaaaagctccaaagaaaataaaatgtttttagaacttcttttcttgttcaaatgtttgattgactcgtagagatgaagggatgatgatgatttatatgccgggtgtactgttatttggagtaatgtttcattagatttgttttgtgaaatgaagaaagcagtatgtactttacatttttcatctctacatctaatgtgcaatttgttagcccatcaaaattaattttagatcccaaatggatctttagatttgtaagtaccgttaatggttttttcagttaagtgtatgtatttatgtgcccttcttgggtgaatttctatgaaggattctgcagggtgaatgttgacatgaataactaaccagcaaataagtgtcaattaaaaattctattaccataattggccgtggcccttcctcatcaaagtacagtatgtttagatcaaatttaattttttttgagatgcttgcctgcttagtttcccaatttatctcctctttctgctaacaaaagaagctgttttccatttagaggggcatctttctacgctacctacatgtgaatactatgttcaaacactataaagatttttaagtgttttttaaaaacaaagagatttggtcatttttgcgggtttcttttctccttctaaatttcatggtcccttttatcctttcttcatggattctctacttttctttctcaaaatttccccttttcctgagggatttttgcttccagctgatgtgagggctttgatggtgtggtttatgtgttaggattacaactgctgttcccaaaaggccctaaaatgctgtggctcaagttaatttagaagtttactgctctttcttccaaattccatgtctgcatggtggaaggctggttctcctccaggttgcccagcaagaaagagggaaagggagaggctggggacagcagctcacctcccactagcaaaactcggtctcctgggattccaccaggccctacctagttacaaagagactgggaaaggtactccctagctgtggggctcctccttgctaaaatccctgggatggggaggctgcttttcctacaacaaagaagggagggaaaaaagccctgggggacagttagtctctgtcacaactcatttagctacacatttttgttttgttttgttttgttttgttttgttttgttttgagacagagtctggttttgtcgcccaggctggagcgcagtggcacaatctcggcttactgtaacctccacctcctgggttcaagcaattctcctgcctcactcagcctcctgagtagctgggattacaggcgcctgccaccatgcccggccaattttttttttttttttttttgtatctttaatagagaaggaggtttcaccatgttggccaggctggtctcgaactcttgacctcaagtgatcctcctatctcggcctcccaaagtgctgggattacaggcgtgcaccaccttgcccagcctacaaaaaatttttaaagataactagttcatctttggaaaacatctaagggaaaatgtaagagtgttaaaatgtaaaagagaatggtattttttttccttcatttgggagtcaaaatgtattgtctatagttgatacaccagtgtagatttttaacacgtgatctttgctgttgatggaataggggatgcacttttccttgcattaacgtttaaagagatggatgttacctgtacacaacatttgtaagagacggttctaaaaggtttgttttaaaaattacccgtgtcttgctcacatcctctgtttcatgtcctctgtttcaatctggtttttactgtttaagatgaatgcaagcaatcaccaagacacagcttcctaaaatgttagaacaccggggtcagaaagatcctacaagtgtctagaagtaaaacaaaacacaacagattattttaaaaggctggtgattaaaatgtttcgattcaatcactttgcacaaggggataagagcaaaaattatacagtgtgtattataggatgcatatagtcaaatgtcaggctcaaaattaggccagtagcttctgctgcttggacgttaatcttgaagcaaggaagaatgagggaatttcgggggggtgagggcgacagagttaaggtgttcagtgcttttatttttgtcctacacatggtagcaaccgagtgctctgcgaaatagcagtgacccgttattccagagtcagggactgttcttggcactcgaagtggaatgttgaagtggaagttttgcctcccagaggatttccgttccagctagtgtctgtgtcgctgtgaagacatggaggaagggtgaatgccatttatgcaggagattctagaacactcggttaagaccatctgttgatgggtctggggagaagggaaggacacacttctgtgtttgtggctatttgctgctaggcagcttgttgatactccaactcttctgtagttgtagacttggccatagaatgaagaatgtaaaaaagatatttgggctgggcacggtggctcacgcttgtaatcccagcattttgggaggccaaggtgggtagatcacgaggtcaggagttcgagaccagcctgaccaacatggcaaaaccccgtctttactaaaaatacaaaaattagccgggtgtggtggcacatgcctgtaatcccagctacttgggaggctgaggcaggagaattgctttaacctgtgaggcagaggttgcagtgagtggagatcctgccactgcactctagcctgggtgacagagctagactctgtctcaaaacaacaagtaaaaataaatatttttgtagttattagtttattaaactgtaattttcttatttctgtaggagataattatgtatttagaatggtcttgaagggacatcatgacatctagagaggtcgtttgaagctacaaggtctgggacatggaatttgtcttttataagccctggcaccttctaaggtgtctcacttgcagaccccagggaagccattcagctttctgattctgtggtggtttctgttccctccacggaggttcctggctccatctctctgtgaagccctgtcagggttctttcactttccttgtttgtctcctttttctcctgattgcctgaaatcacattacaactctcttgtatcatctttatccatgtgccacagctctttttttttttttttttttttttttgagacagagtctcgctctgttgcccaggctggagtgcagtggcgcaatctcggctcactgcaagctccgtctcctgggttcacaccattctcttgcctcagcctcccaagtagctgggactacaggcacccgccactgtgcccggctaatttttttgtgtgtatttttagtagggacaggttttcactgtggtctcgatctcctgacctcatgatccacccttcttggcctcccaaagtgctgggattacaggcatgagccaccgcgcctggcccatagctcttaaaaaatagggataaattatagacagaacagccaaatgagaactttcttgattccctctcttcttgcatggtggttgtattagtcagttctcatgctgctaataaagacatatccaagactggataatatatatagaaaaaaagggtttaatggactcacaattccacatagctggggaagcctcacaattatggcagaaggcaaaggaggagaaaggcacgtcttacatggtggcaggcaagagagcttgtgcagggcaacttccctttataaaaccatcagatcttgtgagacttactcactatcaggataccagtatgaggagaactgcccccatgattcaatggtctccacctggccccacccttgacacatggggattatcataattttaggtgagatttggttggggacacagccaaaccatatcagttgtccacccacacggaactcaccttcctaacccatgaaatgcaaaaatgcctaatacttcagtgttagggatatgaaaagacagaaaaaatatttcctctcttcccctaggaagctgacttgtgcatgcacaaataggacaagagattaaaccaggaaggcacgaaaaagcccctgactacttcagtcaaattatagcttactgtggtatctttcagagcatatgaataattgtgaattggcctatgatctttgggccagtggaagagaataatattagggatgaatattttctcttctcatctcatctaaactctcaggagatgttatccaacaaccatgccaagattcttggaggaacagaacagccattgaagatgttgtagtgataacgtcacattttctaccccctcaaacccaaagtccccatggtcttaacggtttgcttctaagttagaaccatcaccttattccaccaacatcagtatggttttcttgtgtagaaaggcttctaaaaaaatgggcaaaggacatgaatagacacttcttgaaagaaaacatacacatggccaacaagcatatggaaaaatgctcaatatcattaattattagggaaatgcaaatcaaaaccacaacgagacaccatctcacaccagtcagagtggctattctaagaaattcacaaaataacagatgctggcgaggttgtggagaaaagagaatgcttaaacactgctggtgggaatgtaacttagttcagccactgtggaaagcactctggagatttctgaaagcacttaagttagaactaccattcaactcaacagtcccttatgggcaatacccaaaggaatagaaatcattctaccttaaagacacatgcacgtgtgtgttcaccacagcactattcataatagcaaaggcatggaatcaacctcaatgcccatcaacagcagactggataaaggaaatgtgttacacatacaccatggaatactacgcagccattaaaaaaaaaaagcaagatcatgtcctttgcagcaacatggatgtatgtccctggaggccatcctaagcaaactaatgcaggaacagaaaaccagatgctgcatgctctcacttagaagtgggaactaaatagtgagtacaaatggacataaagatgggaatcatagacacgggggcctacttgagagtggatggtggaaagaaagtaaggattaaaaaactacctatcaggtactaggctaattatctgggtgacaaaattatctgtacatcaaattactctgacaccctgacacatatgtatctcctccttctccccacaaaaaaatctaataaaattcttcaaaagatgtggaaatgttagtaacattgctttcgacaatttttgaatcaaagtggtttatgttttggctcatttcccagttgtttcctgatagttttgggtaaaacaaaggaaatatggacacgagtgattatattttttaataatggagttaggtaaataaacttcctttggtgattgaaagactcactccaggccgggcgtggtggctcacgcctgtaatcccagcactttgggaggcagaggcgggcggatcacaaagtcaggagatcgagaccatggtgaaaccctgtctctattaaaaattcaaaaatattagctgggcgcggtggcgggtgcctgtagtcccagctgctcgggaggctgaggcaggagaatggcatgaacccgggaggcggagtttgcggtgagccgagattgcaccactgcactccagcctgggcgacagagcgagactctgtctcaaaaaaaaaaaaaaaaaaaaaaaaaaagactcactccagtgcaattcctaaattctgtaggctctccgtcccttctagaaggatattctggttcccccatccattcagtttacgagtcaaatttgcacaggcatgtatgcttatgtgtgcttaacatattggcagtaggtcaataaatgtgctctaaactcacgtaatatccctgtttgcttgtcataacagacacatatatactggagttctctttagtactaaccaattcgctggtatttgggttgtttcacttggagaccttggagccttcacaatgaacacatggtaactttttttttttttttttaatgaggcagtgagctgcggaccaagtagatttaagaaggaaaaaggaattaatgaaggtcttcaacttctcaactcttcattggcacactcaactaaaaactggagctcaaataactatttgctctggttggcacctttccttttgctaaaagaatggcaaaatgcccctccattctgctttgaaaactttttattatgggaaactcaaacataaccaatagtagacagaatatatagtgaacttcatatgctcgttacccgacttcagccatgagctgttcaaagccatccttgtttaatcaatattaccaccctcgttttccagactctattgctttgaaggaactcttagacatcatttcatttcatctgtaaatattttagtatgtgtctgtaaaagataattctgcacatgtgtgtgtagaataattgccaagctctggtatttaaagagggtctttgtttacgaaatgatttctacaacgtggagccaaaaatggatttaaaaaatacccttctaggggaagttaaatgcaatgtatcttcttctatctcctcaaaaatttgttgaatgaataaaaaccaaaattagatcagcacccctcttcctctccaaacaaaagcaaaacaagaaaaaggaatactttttatattttaaatgatgtcttgggaacggaaaatttgcatttctcttcccttagtagaaccagaatgaacgttagatttaaatgtagtaggtttgggtttgactgtggtggtgaaaatggctttgtgttactgaatagctgtagctgccccatattttgcattttcagatgtccagtcaagtgagcactaatccttagtgtccacaacaggaacgttcccgctctgcccctgatacgagcttggatggccatgaggcccgaggaagttcactgattgccttaggtgaattgattccatgctaatactggagtactctttgtaatggcttttctgtagagacatattaggagtagaaaacatggaggtgccctctgctgcttcacatttcacgctgcagaaaagatgagcttgttctgtcctgggtgctttgaaactggcatttggttctatagagtgctcctggttatctgcatgggctttgtttttcagctggagtgattgttaaatcaagtcatgctcttccccagacatgcctttagtttctgtgtaccccaaagaatccctgcagtttctgtcccagttactttgtttgttaattttctagctttttttttttttttttaagtcaatgactgctgggacctcgcactggttggcagtgtgctcccatctgctctcttcaagctgaggtcacagacgggctcctaaggacgtgacacctcatctagtgatactcagaagctattgttttgcagtatttttttttttttttttttttgagataggttcttgttctgttgcccgggctggagtgctttggcaggatcatcatggctcactgcagcctccacttcctgggctcaagccatcctcctgctttgcttgagcctgttggttgtaacattgagagacaaaataacctgggaagagtgcagagtgcatgcaggactgacttagaaaggttgtgttagctggggaatggggatggagcagacttagaagcagatgtgaagcatcttaaaaacaactacagttgacccttgaacaacacgaatttgaagtgtgtgagtcacttatacgtggcttttctttgcctctgccacccacgagacagcaagaccaactcctcctcctcctcctcacctactcagcatgaagatgagaggatgaagacctttacgatcatccgcttccactgaatgaatgctaaatatattttcgcttccttttgattttctgaatagcatgtcttttctctagcttacttgttggtaagaatactgtacataatgcatagaacatacaagcgtaacaaatcccaaaatgctgggattgaggccggcccctgatggatccccaccgactgtggctgtctcaggaacctgcatggctttcacttgcacactcatgccccgtcagacctgtgtgaattggttagtgttaaggccctaagcactcatttgcgtaatgagagtctttcacttagaaactagctcatcctgctgaccctctgggccagcatttagcatctgtacctggagcctcggctgtgggaactctggccaccggtctaggcattatcatgaggggagccctgttagaacagaggattctcaaaggcttatttcttccctctgacagtcatgaagtgggttacattcatgtaagttggaggagatttattcagtgcttgctctgaatgacgaagttggcctgtctaagggaagctcagatgccatggaatgcagttcccagcccacttcagtccctgtgaaatctgtcagcggatgccttttaaggatgcagtctaatttgtggagagtaagatataaggcttaggggtgatgaagatcacagctctgaattgaagcagattttagagctattagaatcctatgcagtgcacctatcaaaacatacatttctgatgaaagaaattttattccgaagtcaaattatagttgtttcaaaataggaagaaaagaagtatcttcagctcttagcatttttctgatgttaagaacatatccatttatttttgccctaaagagaagttacaaagcatccaactcctttgtgtggaattgatttgagtaagtgtgaagcaaaaagccaattcagttttatcgaaacttatttgttttcattaaaaagccaatatttatttatttattcatttatttatttattcatcgagatggagtctcgctttgttgcctaagctggagtgcagtggcgtgatctctgctcactgcaacctccgcctcccgggttcaagtgattcttctgcctcagcctcctgagtagctgggactacaggtacctgtcatcatgcctggctaatttttgtatttttagtagagacggggttttgccgtgttggccaggctggtctcgaactcctgacctcagatgatctgcccacctcagcctcccaaagtggtaggattacaggtgtgagccgctgtgcctggccgccaattcagttttaaatagaagatttgaaattaagcaagcgtcctgtacctgaacagcagacattaccctgaagagcctgttggttgtaacattgagagacaaaataacctgggaagagtgcagactgcatgcaggactgacttagggaggatgtgtccgctggggaatggggatggagcagacttagaagaagatgtgagcatcttgaaaacaacttcagttaacccttgaacaacacgagtttgaactacgtgagtcatttatacgtgagtcatttatacatgggttttcttctgcttctgccacccctgagacagcaagaccaactccgcttcctactcctcctcacctatgtagtgtgaagatgataagggtgaagacctttatgatgatccacttccgcttaatgaatactaaatatatttttgcttccttatgattttcttaatagcattttcttttctctagcatacttgacgataagagtaccgcacataatacatagaacatacaaaatatgtgttcatcaactgctatcagtaaggcttcaggtcaacagtagtgttttggtagttaaattttgggggagtcaaaatttatatgcagatatttgacttttgggggattcagtggaaaaactagaatttcagttttacagggtcaattgtaattccagtgaagttcatgcacattttacttattttttgaggtatggcagaagtgattctcttagggcaaatgtggtctgtgtgagatgaattgattttccctcttggtgaatttcctcactggttagcccagagcaggacaaggcaacttattgttatttttccccttagctactgtcatttctgtaccgtggaagacaatgagagctgttggtttggtttaggaggtcacatgtgtggagggctgggttagcatggatagtggagacatcaaagtgttaaagacctcagtgaaaagctctgagttagcagatgtgcagcagagtttgctgtgaggtgaggacaagctgtgttttgggggccaggctggcaaggattggtgctccagaaagtatttgaagattaatttgaattgaactggaaacatgactcattgtggtccaagtgttatagactgaatctgccattttcgtcttcagttgattccagggcaggtacagagggcctgatagaagatggaacaggagctcttatggtcttgggtgcctgtgttattatccattctcacactgctacaaagaaatacccaggactgggtaatttataaagaaaagaggtgtaattggctcacgattccacaggatgtacaggaagcatggcttgggaggactcaggaaacttacaatcatggtggaaggcgaaggggaagcaggcatgtcttacgtgggctggagaaagaggaagagagagaagggggaggtgccgcacacttttaaacaaccagatctcatgataactcacttttaccatgacaagaccaaggaggatggcgttaaaccattagaaactgcctgcacgatccagtcacttctcactgggctctgccttcaacactgaggattacaattgtacatgaaatttgggtggggacacagatccaaaccatatcaaggtggaaccttggaatagaatgaaatgatgctcttgcaaagaaaccctgtcctcatgcaggggagcagcctacgttttctatctttgggcctaatagcagcggctttgaacagatatccatacgtttagtaggacatttgactaccatggcattttgcatccttgtaagctttcatctaaaccacagttttatgaaagattctctcaggaatagagacactccctcattaaatcactgtacatattaagtcagtgcacacagtaagtcatggtgcatcatatcaatgaaaagaaatgggctattttattcttttcattgggttaaatcttactggtgacagaaagtactccaacagttgatactgtaaatagttgggtctaatggtacgttgcctggcttggttctctgagtttttctcattgaataccctctgtctctgttctgtcttcacgcactttattcctgatcctcagttttctctcagctgttctgctaaaattgcatgttctggtctccagcagttctcttagtgtgaaactcagtggcctttccctgttaaccttctcataaatttgttacatttttcatttgattactccctcagttcccccaatgttagttccctagtcattcactatccggatctctcgattgattgattgattgattgattgattgattgagacagggtctccctgtgtcacctaggctgtaatgcagtggcatgatcatagctcactgcatccttgaactcctgagctcagtgatcctcccgcctcagccttcccaagtgctggagttacaggtttgagccactgtgcccagccttatcctgatatctcattacatctcatttccagtgattcttcattcttctgcctcattttaatttgctcatatgatgcaagataaataaaacattctccaaaagttgccttgaagtttggtggtgtggctctgccatgaagacccatgagtgttgattttcttaggcaagccagtctagaaattttgcggtcagctgtgggcttttactatctgtaaaactcttgcaggagccaagtattactattgtatccagagagaatcctagctaattctagtgtaaagaaatcagtgaggagaaaagtaaaacataattatgcaggaaagtaggcttttatgactcaattaacatattttacagcgttttattacttcaaggcaatatttaatttacaaatgatttaagattttaaaaactgttggaactgagttaagatgggtggaaatattaagtacttcagtttttctgtgctgcctgatactttgtactagccagtaaaatatttgttaaagaagtgtttgtccttcctttgaggtattttctttttttttctttttagtggctgagtctattggaagggccttagttatacatcatgccatatggtattagtgacaaaaatattttgaggatagatttaataactaaaacaattaggttagaaggccattgtgagaacgcttggccagttgctttcagatttaatcctttgttacgttacagtccacagaatgtagtgtcttttgcctgagatacagaaagtgttatttctgatgtggattggattttggctcatttagaggacgtcaccaatcctatacaacagagcaggatggatttcttttctaagttaatatgaagtgttctgtgcaatttatgtatatggttgtgtgtgtgtgtgtgtgtgtgtgtgtgtgtgtgtgtgtttctgtttctgtttctgaatatcttttaaggtgttacttttttgagaaagagaaatttattggacgttttaattgtggtggtctgcagattctccatagcaaccgggggtgcaggcttactccagaagcaagtagcagttggggtcaccaagtaatgctgttctatagattataccggtgagctgcgtctgcatttgatgcctcctaagatagtgtgatatagttggattgtaagaagttgggtcatggtttttgtttggattttaaaaattgtcaaatagacataacatacaatttgcaatgtggaccagttttaactgtacagtttggtggcattaattatattcacgttgtcgtgcagccatcaccatgggccggagtgctttcctctcccccattggaaactctctacatgttgaacgtggttcccagtccttacccccttctctgggcaaccaccgttctgttttctctttctatgaatttgaccactatagaaaaagatcagtttctcccaaactttgcctaaatccccaaatagattccttttcccccctccggcttcttttgaacattaaagcatcctggtgatttatgctcccgcctcaattcctccctagcttctgtctggctgtgtcaggcctgtttcaggtgttaatttctgtgatcatttccctggtaaactcctggatggcaggttctaggttttattcctgtcgtcctggaacttcacgcttgtctctgatgcagtgcaggcctcagctccgtagggaggttaacaaatgaagctgagttccgcaaggcagcccaaagcactcgagttacaattgcagacagtgggaaacggcaagtcagaggaagagcgctgggacactgggccgggtctgcgttagtgggtttgtcaagagccacggaaatccttttaccctgcctctcatggaataatgctttagttaatgtctgtatcggtgacaggtcccgcttttaatgagcagctcacttataaggtctgagtatgatcaggaacctttaggaacaaacactctgttgtggtcctggttgtgggactcagggacacagtgttctagtccccgtttaatgacacttctcgtttcctgtattgttccattttggtacagttaaggattgggagctaattccaaagaggtttcgttagctgtgatggggagctgatgaagaggcagcctcttagacacggaaggcagcacacagcaggccgaactgtgtgtctgagcatcaggctcctggtggtggctttggctgtgtcactgggaaggtggagggggtggcctctcggaggctgcacggtgggtttctgagcctggttctccaggccaggtggatgtgacggtgcctggctgtcagcggccaggccggctgtggatgacgcttgcctttttcctcttgatagaccatcatgttgctcccatcgtcagcaatgagttgtcgtgtcctgagatgaactccctgttgtcggaggcaggggaagagccgtcgcgtagcacatccggtgtgtgtgtctgctttgtcaggcccacttcacaaaatacgtttgaaatatgaagtttccccagataaactgtgaagggtgaagagtgctttagatgtgtgctttccccagattttatttacttatttgttcccaaactcatttcctgccttcccgtgtttctgcaacaccagcgcttcctagtgtgagccttaaagaaagacgatatttaacaaaagaagaaggggaggaaggaaagaaagcgggagtgggggagagagaaagcggggaggccctgtggggagctggggtggggaggccttgcggggtgttggggagagagagagagagaaagcggggaggccgtgtagggagtgggggagagagagaaagctatgtgaaaggtgagtcaatgaaaacttttgcatttataaattacccagtctccagtatgtctttattagcagcgtgagaaaatactaatacaccccatctctaccaaaaaaaaaaaaattagctaggcatggtggcacacacctgtggtcccagctactcgggaggctgaggcaagaggattgcttgagtctaggaattcgaggtggtagtgagctatgatcatgccactgcactccagcctgggtatcaaagtgaaaccctgtcccttaaaaaaaaaaaaaaaaggtaagcctcaaagttatcctcatccaccagatatttactaggtgcctgtaatatgccaggcattatggtgtgtccttaaacctttatttgaagaagttattgggctcaaaagatatctgaatttttctacccatattttatttgtgctagtcttctatttttccttatctctcaagttgataaagctctcatgaagctaaagtatgatcagaaaaacttgtttctggcaaggcgcagtggctcacacctataatcccagcactttgggaggccagggtgggcggatcacctgagttcaggagtttgagaccagcctggccaagatggagaaaccccatctctactaaaagtacaaaaattagctgggcgtggtggtgtgcgcctgtaatcccagttactcgggagggtgaggcaggagaatcacttgaacccaggaggcggaggttgcagtgagctgagatcatgccactgcactcccgcctaggcaacagagcaagagtccgtctcaaaaacaaaaaaagaaaaacctcatctccattagactcactgtgtaatttctctttggcctattctgagttcctttgttaaggcttccaaggtgctgcctgcacccagtgctgtgctgtgaatagtgacctcagactggttctctatttgtgtgtttgttcttgcaattctgtcatggacattaatggaaatatttaggttttagtgaaataatttttttttcctaggagaatgaaatcaatgggcccagtagacttgttttcactttggcttgttttaataaaaagcatttttataagctgggtcggggaggaagtgaacattgtaaaaatttctcaaacatttgttattttacaagcgcaaataaatatgtctgtttaatttaaaaagttaacttattgaacaattcctttttctgcaccttccctccccagttaaggcaaactattaaagaatatgcataaatagtagagcttttaattgctattgatgaatagcacccttttgcatgtcttttatgtcaagccttgggtgagccctgtttttgtcttattaacacacattcgtagcgtcttctctcatttggatgtagatttagatgctctcttagccactcttctcagccttattgaagttcatccactgaaacacttgcaagaaacagaataaagtagaaaagtctcagctgtagaaacctacaataaactgcagttacacacagaaacccagtggctcattggtaccaagagccaataccagtagcctccataggtgaccatcactccgcagatgacttcggcggtagatgacctgtaggtctggaagagctgtaaccattcacctttcttttttttttttttttttttttgagacagagtctcattctgttgcccaggagactgtagtgcaatggtgtgatgatctcggctcagtgcaacctctgcctctgagcttcaagcgattctcatgcctcagcctcctgagttgctgagaatacaggggcgcaccaccacgcccggctaatttttgtattgtttttttcagtagagacagggtttcaccatgttgaccaggctgattttgaactcctgacctcaggtgaaccgcctgccttggcctcccaaagtgctgggattacaggagtgatgcgcacagggtcccatgtgaagcccaagtcatgcttctctgggtgtcagtcacttcatctgtgacttgagtggatgtgactagcttgcaagttctcagtgttgggggcgcaggaagagaggaaggatctttaccaccacagtggacagggcggcagtggtgggtgcaggagacaggtgctcttctgaaaagttctgcatgtggggatgccttttagtctctgatcctctcctgggaagatgcctgggtttaatgaactaaaatgactttccgactctgacatcctgtctttataaggtaaagaccattagattcaagagcataattggatagatatgtttaaaggttgtctttcaggattattgtgctgatcacagttttcacctggctttcctgtcccagtggatagtgagaatgatttccctattaaaaaattacccatcaacagactcctggttagacagtgtgttgagaattaatggtgtgtgccatcgagtgatgaaaggcagagagaaggtcttagcctatgggggaattctgagctagaactcacagtgtaatttttccttctttacaatgacatggtttataatgaagccttggtaggctggaggacttgtgtcagaatacaagtaccaaagaagtcacagaggaatattaactgagaaggcttttaagaaagaagaaaatacctatccttgtgctaggccaggcattgagggagggacagaggcctggctgcatcaaggtgtcctgacctgccttggagctggacagtagctgggcttgaagatgaccgcaaactgctgcctgtcccccttccagggaggacgctaccatgggatggattagacaggggaaaaagcatcagaagtcagatgagagaccttgtctttgttcctctgtttcctgacagcagcaaagattttgatcagaggtggtttttgtggaggtataatagcaaaaattaaagaaccacatctgacttgggaaggggcatattatatgggaagtgagagagagggagtgatgggggatagagagagatgggaggaagagaggagcagagagagaggaagaaagagagagacagggagctggaactgctttagctaaggtggcttggtggagtttttcttgcttgtataattatggtgattattaatttaaagcttgtccttcccaagtgatgcaagtacctgctcctgggccatcctgtgctaaggttgcattgctgaacggatgacagggtgggtggtgtatgtccctaaggccaccagagatggtttactcaattcacatgcttcctccacctgggatgaaagcggttaattaatgtttgattctaagaagtcaggtgatgtgattcagattagttatggggttgtgctgaagcgcgggtggaccctaggaggtgattttaacggaagtctcaaaatagcagccttggaactagttggactagttatttttaaaaataatgagaaatgttataaagtcggctgaaggtattgatttacctttcaggttgttcagaaacagaatcttgagaaatagcctgctacacagttgtaagggggataataaagagatcccccttctctaaaaaacgtttacaacccaatctttgggcagccgagatttttagcagccgagaagggttcccaggggccacaggttgtcttagaccatctccatcagttcctagaaatcgtgcaaagggtttcttcaggggtttctgaggcctgtaaccatggtattaaaatctgactctagaattctttgacatttcttgcattgaggggtgagacccatgttctctgtccttgaatctgggtggctttgtttgggactgttggatccaataggggacagcccgagtgacctcgggtgacttccaaggctgagtgagagaaggtgacacagctgccacctcatttgctggaacccttgtcctgggcacctgagtcatgggggaacaaatgtggttccatgctgtgaggccgccatgctgcatggagaggccatgtataggcgctgtggccagcagtcccggccttcccagccaaggccccggttattgtggagcagagacgagcctgccttgctgtgttccatctggatttctaaccgaggaatctgtgagcatcagcaaatggtgttttggcccctgggcgctagggcagtttgtgacccagcagaggtacctgcagcagcagcagcacctcctctctccctccagctcatgctctttgcagaactcaccacacacatttcctcagttccctcaccgcttttgtggttgtggggatgtctttagcacccgtgctgtgctgcgctgatggctgctgaggactggacgccagtacctaagctcggctcgtgagaacctccgtgcaggaaggggcccctagagccagaacagaggctcttccttctgcttccagccttgggtaaaaacacacgccaggcgtcattgacatcattgtcatcatcatcaccatcattcactgttggtcttttccatctgtccgctgtcattttagcctcagccatgacatttcttagtccgtgaaatgctactgagattgtactgttatttgaggtagttcttttggattttattaaccccagtatatctgttgcttacaaaataacgagccacatgctcatacaatggcagtgaaggttctatatctggcagcctcatgtgaattcaggagccggcagggaatttaggggagaagtaaggcaagctctcaagttttccaagccgcatgggctgcttggatctcacaagtaatgcctggatttaaatcactggggaaggcagccttctgctcctgtatagtagaaatgggtcccagtcttgagaggctgcaagtttaagcttttcttagtcaccttgttcttacacttttttttggtacaaatgtatttgtacacagagagacttttgcattttaagcataaaagaaaggatgacctcagaaagtgagttccatctgggactattattatttcagcacttactttatcaaagaggaaattgttttatgtagactcctacagtgggacagccatgtgccaaaaattaaaagtggattaacacattatataaaaattaactcaacagattatagatctagatgtaaaacataaagctgtaaaacgtttagaagaggacatgggatttgtgggttgggattaggcaagagttcatagacatgagaacagacaacaaattgataaagtggacttcatcaaaatgaaaaatttcctgtgtgaaagacacttaaaagaatgaaatgtcaaaggacaaatacagactgagagaaaatattttcaaatcacatacctgacaaagctcttgttgtatctagaataaaatggactcttaaaactcaacaggaaggaaaaataatccaattacaaatggagaaaagacttaaaaagacacttcaccaaagaagatatacagatggcaaataagcagatgcaaagatgtcggtattatttgcattagagaattgcaaattagagccacagtcaatattactacacacctattataattagtaacataaaaaactgacaatatcaagtgtcgacaaaggatgtggaggcactggaactcttgtatgttgctagtggtgtgatcccatgcaaaatgggaaagccaattgggaaaacagtttggcagttcttacaactttaaacatacacccaccatacaacccagcaattgtactcctgggtatttaaccttgagagatgaaaacttacgttcacataaaacctgggtaagatgtttatagcagccctattcatagttgccagaaagtggaaacagcccaggtgtctttaagcagtgaatggacaaatgacaaacagattcattcaggtaatgaaactggctcagcaaaaaagttgaaagaactattgatacaaccatggagaataatcttgaaggcatcatgctgggggcaaaatactagtctcaaaggttgcatgctgttagattccatttatatgacgttcttttttttttttttttgagttagagtctcgctctgtctcccaggctggagtgcagtggcatgatctcagctcactgtaacctccatctcctgacttcaagtgtttctcctacctcagcctcctgagtagctgggattacaggcacacgctaccacacccagctaatttttgtatttttagtagagacagagtttcaccatgttggccaggctggccttgaactcctgacctcaagtgatctgcccaccttggcctcccaaagtgctaggattacagggcaaaactttagatcagtagttgccccgggggttgaggtggaggaaggatgtgactgtgaagataaacagaaggagggatttttttttcggggtgatgaaactgtatcctgatggtggtggtgggaatggaaatctatacatgtgtaaaattcataaaactatatacctaagacaggtcaactttattgtgtaatagaaacaaaaaaattaaacaatcttattattttgttgttgttgtggatacgagagaggaatagggagaacttttttttttttttttttcaaggaagacctggtttcccccagtggtctggtggcccaaattagagtgacatgaagggaagcactgggggcaaaagtccctcgtatgaaggacagcagggaggagacgatgcttttcatggtagtccgcagggcatggcgacatccctatgtttgtcttttatttacggtgactttcctaaaatacattacccaaagaattgcatggagaaattactgtgcaacccctttccccaaggggaacaccaaaagggaatctagttcggttttaagagcagctttggaagcaaaagagcggttgctttgggaccaggaaacaaaggcttgacttgaaatgatgagaaagagccagagatttgaggttttcgttttccagtgaactttttagagagttaactgcacagctcaaaacggaggctaatcagaggtgcacaattaaattaccatgcaccacttagaaaattaaagggtaactcgatagtctgtgtgatttcgaggattaattttgagacaatgtaaatggctattattagtatttgtattactgataatctttacatgggatgccagacgtgttgtgggtctttggaacagtagctgtctaagctgatttcagagacgaatacagagccgaggctattaaacaagatggcctggtgatctccagggtctgcttttgcagcttaggagctttggggaatgtgcgggggagttattgatgggcaggtgccgctggcatttcctgggcaggggctaaggatgtcaaatgtccctcagcgcctggaagagccccatacaatgaataattgttcctggtgatcttgaaatgttctgccagacacaaaggtgaaattatgtgtgcagtgaatggagcttggaacctaattccagctctaagttgtttatatatggtttgtatagttttaaaatagtctgaatttttcaagaatacagctgcctggtaagtccaatgaagatggctcttttgtttggaagcttaacaagagttgtttactcttagaaaatcagggactacaatatccctgttgatatttcaatccaggcaacacatacatatcagtgtacatttattttttctggttgcatactggacaattttacgtatgactattcttgtgctgcattcaaaatactgcatagaaaagaatgccaacaatattcagtttaatactgttttcttttaatttttaacatatttattgagatataatttacatactatgcaattcacccacttaaagtgtacaattcaatggttttagtatattcagagttttgcaaccaccaccaaaacattagaacattttcatcatcccaaagagtaaaccgttacccgatagcagccacttccatccccaccctgatactatcttctgtcagatccccacttatttattgttaagtagataaaagatttgaccgccacgttgtaccttctggtagagttgtacctgagcctgtacctactgaagtgtgctttattttcttacgaattactttccactattttttctctctcaagattgggcattttgtgactttaaaatagttatatgtgagggtaggttttgttacctctgaatatgtatttagaagaagagaagtccttggctctgactggattgagaagacatccatgggtcttccttacacagaggtgatgactaagcagcagcacagcagataccttgtgataatagaaggattttaaacttctctgagtacagctttattatttcatttattctctacctttaatattggttatggcctgaacgtttgtgaactccccaaattcctatgttgaagcccccgcagtgtggctgtgtttgaaagtggggccttgggtgggggcgcggtggctcaggcgtgtaatcccagcattttgggaggctaaggcgggtggatcacctgaggtcaggagtttgagagcagtctggccaacatggtgaaaccccgtctctactaaaaatacaaaaattagccggacgtggtggcgggcacctgtaatcccagctactcgagaggctgaggcaagagaatggcatgaacctgggaggtggaggttgtagtgagccgagatcgtgccattgcactccagcctgggcaacagagcgagactccgtctcaaaaaaaaaaaaaaaaaaaaaaaagtggggcctctaaggaagtaattaaggctcagtgaggacataaggctgggtccttaatcctttaggattactgtccttaaaagaagaggcacctgagagcttatgcactctccctccgcctcccttctctgcctgagcacacaaagaggtcatgtgaacacgtagcaagatggcggccacctacaaaccaggaggagaggcctccgagtgaaactgaccatgctgcccccttgatctggggcttcccagcctccagaactgtgagatacgtttctgtttaagacacccagtctatgcttttctgatggagtagcccaagcaaactaatacaagtttcttctagctggtaagaacaaccattcccttgggaccatagtggaagtgagtacagccatatctgcctttgagtaaactctgactatgaggagtaactcagggaactcagattggggtggagttcacaagatcctcggctgcagtttgggctctacctcttggtttttggagctcccctgcctggtctcctccgcgtcttctctttttacttctggctcttcactctgcaccatcacctcttactccttattccattatttttcaacgttgcattgttgctgaaccgcagtgtttagcaaacctttattttctcataagctgaatatgcggtggagagaagggtttcccacaaacatactagaaaaaatgtgtgtgtgtgtgattatagtaattattcacacttatagcaaaacattcatttgattcaggaaaggacaaaaggtaaataaagtgttcagaaatctcactattgtagagctagaatcattttgggactacctagacaactttgtgtgtgcataggcaatatatttacacaggcatgtacttttacattcatagagtcctactatattcactaaactgctttataacagtttttgttgatgtttttggcaataaatacagatgaaatataacattttaaatagccatatagaattccattttatgtatgtattatgatggttgtaacttgagggtctttgggatatatctctgtctctgcctatgtctctgtctctataactctatcatctgtatcatttccctaatattacataatataaaatgcaaattttgttaaaaagaaacctttttaagcaaagttctttgtacttctgattatctctgtactatacattgttccaaggaactttttatcaatatgtactttcttttcttaaagatgttgaaacaaactttatttttggacatatcaaacctaaagaaaaagtacagaggttaaaattaaaaaaatctgcacagcacctgtggggctttatcaaattctaacatttcaacatacttcagattgaaaaaaccactatagttgaaaccccatgtaatattggggctcctttccaacaccttttgtcttctatggcaactgctgtcctgaatttggtgtttattttcctcattttttttttttttggttttttttttttttttttgagatggagtcttgctctgttgcccaggatggagtgcagtggcatgatcttggctcactgcaacctccgcctcctgggttcaagcaattatcctgtctcagcctccccattagctgggactataggcacctgccaccatacctggctaactttttgtatttttagtagagacggagtttcaccatattggtcatgctgcaaactcccaaactcaggtgaccaacccgcctcagcctcccaaagtgctgggattataggcgtgaaccaccgcgcccagctccatttatgttttatattgcatgtatatttcaccataaatcatagttagtattgtttttacctgttttcagactttccataaatggtatcaatataaataatttttcaatttgctttctctgcttattccacaacttctctgttttcttcatgttagacatttaggttgtcttttgcacatttttactgttaacaaacagagctatgaagaatactcttgggtgaatgttctggtttacaaatgagagcatttctctgatgataatgagacagtcattttccacagtggttatcatctagccagcagcatgcagtaatccaagttttcccatgccctggtcaaagcttcatttttggccttgggctagatgtgaaatcctgtctttctgtggttttcatccattttctgtgattgctagtatggttttgtgtcttttcctagacatgagggtttcctttgtccattcgcctccccactgtcccctcttccatttcaacataccctgtttattagaccttacttttgtgctgtgctgtgtatgtgtgtgtgtgtgtgtgtgtgtgtcttccataagttttcatttcaaattcttaaaaattttcttgtatattccttctagaatttctaaaaagtaaagatctttaatccatctggaatcgatgcctgtatatagggcagtcattgttcagggccagtcagtttcagctgggagcgccctttttcatcacaggtgtgagtacaaacaggatcattttccttgtgtactgtgtcagtccactttcatactgttatgaagaaatatccaagacggggtaatttataaataaataagaggtttaatgaactcagagtttcacatggctggggaggcctcacaatcatggcagaaggtgaaggaggagcaaaggcacatcttacatggtggcaggcaagagagcttgtgcatgggaactcccatgtataaaaccatcagatttagtgagactcattcaccatcagtagaacagaataggaaaaacccacccccatgattcaattcccccctagtgggtccctcccatgggacacgtgggaattatttacaattcaaggtgagatttgagtggggacacagagccaaacaatatcatgtaccgtgatgtgaaaaagtttgggaagtgctggtcctatttgtcattttatgacattctgcatacatttagaggtcaaatttgtcaagttccctaaaaaaacctccaatggaattttgattggagttgcataaaacttattaatggaggaattgaaattattatgatttcagtttgcattttctaacaaatgcattgcaaatgtaagaaattatattttaatggatggactcagtgctgagtgctgacaagcatcccaggtgagtaataaacccctgccttcaagtagttcatagcttaaagctatatgcttggaaatggacaagggagagttacaaaatatggaggtattaatgggacattttgactatactaagaaatatacaaactctcgtgttaaagaattcaaagggagaagagaccatatcagtgtgtcagttttcttaatgatttggtgagtacctacattgtgcaccttaagatgggatattttatccctgacgttattttaccctgaatcactgttaagatgctcataaatgccgggcacggtggctcacgcctgtaatcccagcactttgggaggctgaggagggcagatcacaaggtcaggagatcgagaccatcctggctaacacagtgaaaccccatctctactaagaacacaaaaaattagccgggcgtgttggcgggcgcctgtagtcccagctactcaggaggctgaggcaggagaatggcatgaacccgggaggcggagcttgccgtgagccgagattgtgccactgcactccagcctgggcaacagagtgagactctgtctcaaaaaaaaaaaaaaaaaaggatgctcataaatgcctcagtgaaacttagggttaccctctccttttcaaagaagagatccaccttttcttttttaactgagagccttcctcctcttcccttgcagaaagattgttaatttgttttatataggaggaatcctgtaataaaccatgtcattattaattaaaaataacacatgctgggtcctgagggaactcaacatggagaaaagcagccactgaaattttaacaggagtgttttttttagacgatttatttaattatctttactattccgagcagtggaggaactgggccgttggcaggcccttatgcgcttggatgggagttgctctctcttaacaggcagtttagagctacagagtcagtaattttaatctcccagtgaaaaatggcatttggaattggccttgaatagtggaggatgtgggtcatggagggtctgaaagaccctgggccttgaatctccatgtcagcccgcaaaacactgaggttagactctttaaactttactttcttcatctgaaaaatgaaaagtgcttcctattacttaacctcccagaatggtggtaagaatgaaaaggaattccatatattggctctcagcaggtgtgactttactgttctctgcaattgttgatcttacttcctatagtgaaatggttcctttcataagaaaatactccagtgattctccaggaaaaaaatagaaggaaagaagatttcaaaggataagctcattttttccaatcctagagaatcagcatctctgccctggttctcttgtctgaattggagaacaagtggctgtaaccctctgaccctccggcttgtttcatttataccgcggggcaagatggtagagaacacttaccacatgattggaagtactttgaggaagaactagataaaagtgagtcattaattaattgttaagagtcagcagctgcacactcaggcgtctcgtttgatgggaaagggaagcaacttgagtgaatttaaatcacttcgcatgtatgacagtgtattaaagtaatgagccatgcatctggccaagttggcgttgtcaagctttgactttctctgtctgtctctctctctctgtctctgtctctctctgtctctatgtctctctctctgtctctgtctgtctttgtctctctctttctctttctgtctctctccttctctgtctccctctctgtctctctctctgtgtctctctgtcttcatctctctctgtctctctcagtctctgtgtctctctcagtctctctgtctctctctcttagtctctctctgtctctctgtctctctccctctctgtctccctctgtgtctctctctgtctctctgtcttcctctctgtctctctctgtctctctctcagtctctgtctgtctgtctctccctctctctctctctgtgtctctctctgtctctctctctctgtctctctatcttcctctctctctgtctctttcagtctatctctgtctctcagtctctcagtctttgtctctctctgtctctctctctctctctgtctctctctttggtagcacctagtttaattcctgtagcttacatgctacaaaaagattttacaaaatccagcaataaacaaaatgaaacttcctgatataccataactgatacctgtgactctgggaatttcttaagacatccggaaataagtgtacctttgtacgtgaaggacgtttgttttccccaagatctaggtcaaattaagaacagacttgtgtcccatccagtttgagataggctggttggctttctcagggaccttgtgtttgcagctctgtgacagtattcagttttaaactttggatttctttctcctgaatgagcaaaagtaatgcttttgcagaacgccggggaattaattgctgctaagatttgaagaaagacatgtgcacagttcctagctctgtatttttaccccaggagtactgcgaacttgatgattttggtttagtgacttccttgccagcggacttacgttttttgtttgcatgttgactgctttgcctagaagttctgagggacatagtttaaagatgtcttgcagtgcacctggttaatgaatccacccacggaaactctgcctccgtgtctctgactttgtcttctgcgatccctcgtgtggccctgctccagtgggcttggcttccttcccttttgtcagagatgccaagttggtttatggcccggggcctttgtacaggcggcactctctgcctggaacacccttccctcagataattgcatggtttactctcaattcctttaagtctctgctaaaatgtcatttttttcatgaggatttgaggaattgtgtacaaataaaatcagccccaccctggcagatttatttccctttttagcatttttattgtctgataacatatttgccacttgaccattcgtctgtcctagcccagaatagaagacgcggagacgcgaacctttattattttctcgctccagttccctcagcatttgggctgtgtatttactgaaggattgagtggatattcttctatcagtatgactgatgtgtcatattgtggctcaaggcatatttaacagagccactgtgttacattcctgctaatgaaaggtaaatgttatttcactcattcaagtcataagattcttgattgagcccaggtgccaggtacaagtccaagtacttgggcattggctgacctggaattcaggtcatgtatttctaagtggggacaatatcacctccaaagaggtgaaaaaaaaatcatgcttttaaaatgtgccaagcacagatgtcagtataacacataaaaagatatgaaggatatctgtggttttacaatttcatgaggaggaggtgtttagaacaaatatctaaaagggcttcttaggggcatgataatgagagaaaaaaaggttgtgaaaccgtggtctttagggcagagaatatcagtgagaacaggcaagaaggttctggcagaatgcctcctgtgtccccatgaatttgccactttctcttcttcccagcattagccagaatttcatggtcagacctacaagtaccagctccagtggacacttctgtgttgcagttaattcttctccattcaatattccttagagttctcagaaaatcatttcttccttaagatggtgcatatctttgtggtttgcagccaccgtcttagactgtcccaagttgtggttaggataatactgaattgtggtgttctatgacttgctgattttttggaatttataacgaagtcaaatatctttttcatccagagatacaattttgtcttccaaatgacgcccaccaggggtttttgtgcatttccttggtggtttaatagaatttgaaacctaatatttcatgtcattttgttacataaattagtgttttccttacgcaggttcacacaaggatctgactcagatcttttaccttctcctctgtggaccaggtcagcgtggccagaagctatgatattgctgatgtgtactttttttttttttttttttttgagacggagttttgttcttgttgcccaggctcgagtgcagtggcatgatcttcgctcaccgcaacctccgcctcctgagttcaagtggttctcctccctcagcctcctgagtagctgggattacaggcatgcgccaccacgcctggctaattttgtattttcagtagagatggggtttctccatgttagtcggctggtcttgaactcctggcctcaggtgatctgcccgctttggcctcccaaagtgctgcgattacaggtgtgagccaccacgctggccatgatatgtcttcgcttggaattgagagcagatgcttttattaaaaataaggatcttaaattctgtaggatttttttttttccattaagctgcctctattttcgaatgatgagaggaataaaaccatgtggcttcccacagctgcccacatgggtcctgcccatggatttagtgtgggccagtcctctgagtaggctcacacactcaggacatgaccctgggggagggggcacgaggacaaagccctctcctgaaggagcagtgctttccaagccctgcaaagactgcaactgatgagggggacacgaccagaattttagaaggaagtatgtgctcatttagtacacggttgtgagctctgccacacactagatatcacatttatcaatagagaaacaaataggcatagtccctgagtttaaggacttcataggcatgcacatatgtatgtgtggtttgcatgtgtgtgtgtgtgtgtttatgtgtggggagggaggttatcatgttcaccagcctacatactatggctatgtaatatcaagaggttcatggagagtccaataggggatctttttcagaggagttgatcctggagaaatcctcgaagtgagcaggcatgctagaccatcttggcaggccagaaaggggaacctcttcatttacaggcacgatgctagtgactttgagacttctcttcatattttgtgtggaatgaaagagagctgaacagagggcttgagtgacttgtcctgtgcatggtggatccaggttttaaactcagttgcatgggagaagaatgtcctccaggtcgcaggcttccttggggaccccgtggctggcctgtcgtcccctgcatagttcattccaaccttgctctcatctgagtgttccttgtgctgctttccagcctggcggggcccatcactgacccattggcgcttccctttcctgggtgtgctgggcccaccagcctccacccagcccctcacctgcctgctcatatggctttggggtacgctcactgccttttctagcccagctggctggatcccttggccgtagcatcttttctgctgggctctgctctcagtgctgtttctggtctgcactgctctgagcctttctaactgccctagcccagctgtaaacattgctgtttttcttgccattctgataaaaatccaacacaacccattcactaattagaacattgcataaacatgagtcctgttgagggaggtcatgcgttttggctcttcaaggttcaccatctgttctcagcatggtctttgtatctcttccctctgtgatgaagtagaccaagttcagcttccaattgttccaggaactcagaaattctagtgttcctgacacttccagttttccctgtgttgtatagattagccttaatctgtgtacttctatgcctgaacatcttcttaataacagcaaatattaagagggctgactatgtctcaggtgctgttgtacaggttttacattaagacttctagcaagcctgtgaggtggggactgttcttgtccctgtggaaaccgaggatcagagaggaaaagtaacttgctgaaggtcatacagctcttaactggtgtatctgggacttgaataatctgggttagtagcagattgaaattatttggcatatggactagtcagggttctccaggaacacaaaacctgtaggatggtgatattgagagatttgttccaaggagttggctcctgtgatgatggaggctgacaagtccctagatctgcagttggcaggctggagatccaggagagctgatggtggaagatggtgtaatttccagtcctagcctgaggcctgagaactggaactggtggaatagttcttgtctgaaggcctccaagctcgagacccaggaagagccaatatttcagatagagttggaaggtgggaaaaagccatcatcccccaaaggcagtgaggcaggagggattctccctcacttgggggtggatcagactcttgttctatacaggcctgcgatggatgggatgtggcccacccatagcatctgctctactcaatctgctgattcaaatgctaatgtcagccagaaacaccccaagaaacacccagaataatgtttgaccaaatatctgagcatcatggccaggcacattgacacacacaatggaccctcacaggggatcgtgacgttttactcttgtgctgccggattggctggcttgcttgcttgcttttctttctttctttctttctttctttctttctttctttctttctttctttctttctttctttctttctttctttctctttctttctttctctctcttttctttctttctttcttttctttctttctttctctttctccctctctctctctctcttttctttctctctttctctttctctctctctctctttctgtttctctttctctttctctctttctcactctgttgcccaggctgaagtgcagtgacacgatctcggctcactgcaacctctgcctcttgagttcaaaaggttctcttgcctcagcctcccaggtagctgggaatactggggcctgctaccatgcccagctaatttttgtatttttagtagatacagggtttcaccatgttggccaggctggtctcgaactcctgacctcaggtgactcccctgcctcagcctcccaaagtgctgggattataggtgtgagccaatgtgcccagccgggtctggttttttatgcatgttttagctgtaatgcccttgtccttccaaagagctatagtcacagaaaggctgggataataacccaacatcttacaccaagtgtggttgagatagaaatcccagagatcatgtgatcgttaagaaatgttacaggtagtgcttgttcattcttccgggtatctcttgtgtggtttgcatagctgcctagcagttcaacatttggatttgccattatgtagcaataatgcagtggtaggctccttgctgttaatgctttgtggatttttctgtaacttgtaaataagttagcagatttagtcattttgcgaggcagcaagtggaaacaactaaaactgtttggtgtcccattttgattagcgctgtgtcatctgcctcccacttaaggggttgtccctcttttctctattgaaggaaaatgctagtttggatataagagtaaatcctaacgtgcaatgattctaaattagactcttactaaatgttctaactaggacatgtttgaatcagtgataatttcaataggggttcatgctatttttccattactttttaaaaaatgacaaaagtaacttggaaatgaaaatagcatgtagataaatatataaagtaaaatgtgaaagtcctccttcctctccccccttcaaactcacttcccagaaataactgcagaaaagctgtgcatgtatctagatattttcctgtttctataaagatactcttatgaaggtattttacattagaaatttagatgagaaaagtggtgtcttgccaaacacacagttctgagacatgttggtttcactcaaccatcttacaacctggctggacatggtggctcacacctgtaatcccagcactttgggagccaaggcgagaggatcactcaagccaaggagttcaagaccagcccgggcaacaaagtgagacccccatctctaaacaaaacaaaacagcaaaaacaaaaacaaaaacaaaaaaccccaatcgtttgtttggctgggtgcggtagctcatgcctgtaatctcagcactttggaaggccagatcacttgaacccaggagttggagaccagcctaggcaacatggcgaaactctgtctgtagagaaaacacaaaaactatcgaagattggtggcattcacctgtactcccagctacttgggaggctgaggtgggcagattgcttgagcctaggaggtcaaggctgcagtgagctgcaatcgtgccatcttatttcactccattgcttctgtgcagtatggatatgtcacataactttttagtcaatgttgaatattatattcgcccctctaggtttttaccatacacagtgcaattgcgttgtagaacaatacaattgagaacaattgtattatatttattatataaataatgttatatgttattatatataatatatattattatgtataacaattgtattattctctctgtattttaaaatttattttcttcatgacttatgggatgtacaggctctgggctcagcatcttgcacggaggtggtggatgctatgaggataacgctgctgggaatactggctgcaggtcatatctgagagcagaactcagtgttttatttagtttatttctcccgaggtggatggagcaccccaatcctctcattacagtcctttggcagagccaaacctggaagcatccccaatcccagaaaatctgtctagtttttactttgaaatgctgtccctctccttctggaattaggttatattgtctgtttacctggtaagtaattaaaatctcagtttcagcactttataattaactaaagggaaaaaataactccagcatgactttctattctggggggttcagtaaacaccattgtgattcgctaacgccccttaggaagatcactaatagctataaacgaaacagaccattaagctgagaacagaggtctccgggcagttgcagtctactgatttgctgattattgctggatgtttatgtgactatgtgcagttcaaacccctgtgagtgggtgaaacatgaggctgtctccggccggttgtccaggatgtgggttctaaggcaaaatttctggattctcgtcattctcttttcctctattttattctgtattttacttctggcctcagcattcctgttcccccaaatctgtgctgctcccttgtgctttacttctgtcttgtgaagatgtggataatggtctgctggactcatcacgtgctcgtgctgttcacccgttggtagtttggctgcgttgggtggtggcctcggctccctcggacctctagagccctgttgatgccgttactactcctacaagcctatggcttatgccttagggtggtgcaattttttttttaaattatactttacgttctagggtacatgtgcacaatgtgcaggtttgttacatatgtatacatgtgccatgctggtgtgctgcacccattaactcatcattaacattaggtatttctcctaatgctatccctcctccctccccccactccacgacaggcccctgtgtgtgatgttccccatcctgtgtccaagcgttctcattgttcaattcccacctatgagtgagaacatgcggtgtttggttttctgtattttttgtaagtgcttcgtaaaaacattctgggccagggaaatgaagagatttttagtttgcgacttgtagagtgaaaagaaagaatttgaatgagttacaaatgaccttttcaggaattgttgcccgggcctttcttcaactgcccactaactccggcacttcaataaacccccttttttagaggcatttagaagggctgtgacaagtgtatttacagcagataaatttagctcatgtattttatctacataatctgattgtaatttatatatcttcagcctagataaaggaaatctatttcttattaccaaatttttctttttgtcaacatgacgtgagtaggatattgactttaactgaagggtggtgattaatcatagcagcttgcagggagatcatttattgctctgtgtagctgagcgactgctggcagagttgtaagtcaatcaagataaacccaagtgggttagtcactcttggatgacgatggaggatgtgatagatttattagccaagttctcctttaaaaatcactttacattcttagcaggtgaatttgcagatagaaaaataccgagtcgccgtcaatggaagaatctgttagtttgcaaagtagagtatagctgttgaaatgtcacaatgaaagatggactacctagagatagccattggaaatgtttagctctagattaatcttgttaagttcaaagagggcaattatgttcttagtaattcaggtgctcgatagactgggaagaagagatttgttctgtgtacaattacatggattgtataatgggacatcttaagatttagaatgaaacagtttgttttttttttaggggaaactttgtaattgtaaccctggctgacagtttagtttgttttgttttattttgtttttgttttgttttttttttttttttttgagatggagtttctcttgttgcctaggctagagtgcaatagcacgatcttggctcactgcaacctctgcctcccgggttcaagcgattctcctgcctcagcctcctgagtagctgggattacaggcgtccgccaccatgcccagttaattttttgtatttttagtagagatggggtttcaccaggttggccaggctggtctcgaactcctgacctcaggcgatccgcccaccttggcctcccagagtgctgggattacaagcatgagccaccgcgtctagccctggctgacattttttgcacacgaagcctttttttcaaacctgcctgtttcctctatggagctagcatgtagtcagaaaatgcacagcaacttcatatgagccttagcaaaagaaaattctgaagaagatccatttaggaagaggaaaaatcagacagactttgccaaaagtaaatgtcagtgattcctgagttacccacccctttcatcaatttcatcactgtttttcctcattagaacagatagagaatggactactgtattaaaatgtttagatgtaccctttatcactgtctgtttctttcattgcttgaggaggtaggacagaaacaaagttcacctttcagctcaggaaggtaagtgccttgggcacggggtgcactaaccgtggcatgagatcccagcagttggaatcggcatcttgggacatggagttctcagcgcctggcattcatgcccggttttgcaccttgttctggtttgggcatttcccctctggcgtgggacagcatgatgtgtccttgtcggagaggtctttctgtgtaccgaatcaacatgtgacatttggctagacagcatcaagttaatatagatgtttgaaactgttcaccaggtgctctctctaaaccagtggttcccaactaaggaggattttgttccccaggttatatttggcaatatctggagacaagttttgttgccacaactggaggcagtattattggcattagtgtgtaggacccggggtactgctaaacatctgcagaatacagcgctgtcccctacaacacagagtgatgtggtccagagtgtcaatagtgctgatactattaaaaaaccctggtctagactggagccatctctgggcttactaagggcatatttaggtcttttggtctttactggtttttctggctgaattgtctttggtttttcattgttacagacacccacctcctcctcctcctttcttgaaaggattattatggatgtaagaggctatgcgtaggacatttactgaattactattttaacatgagagtaaggcgagcatatatgttcccttataaaaatgtagtagggtaagtaacaagggcaggttcagggtgcctcagtagctgctgcgacaggtcagcacatctcagggcctgatgctgtgatgtttaattttgttgatcctgtcacagtccaatgtgagggacagacagcttttcctatacacccccgttccatgtgccagctatcttctatcctggggccctgccatctttgtcaggcctcgtcctcctctgcattcagctggagataggaaagaaagagcttggagaaagcacagcttcacttttcacgggtgagaatcagccctgtggctttaactgagaggcagcagacctggacaatgtgtacctggctgatgagaccatcaatctctgacatggattatgtgaacagatattggtcagtccacaaatgtttacacagccgcttcataacagtgacaaagaccgacgtcttgctccagcattcaggcaggagaaggtcccccttccttgcaggaataaggttagccctttgttctatgcagttcttcaactgattagatgaggtctatccacatgacggagggctgtccactttactcagtctacaatttcaaatgttagcctctttcggaaacaccctcgcggatgcacccagaataatgtttggccaaatatctgggcacctcgtggtccagtcaagttgacacataaaattaactgtcatgaccattgaacttgaggatcctttcacatgttttctagccatttggatatccatttctgggaagtgcgtaagtgtctttgctcatttttcttctttctactggtctgtagttctttattgatccggcattagttatgtgttgcagaatcagttgattgtttactgtgcaggcttctgtagtgtgagagagttcatgtgtaactggtaagtacagcattcatgtctgcataatgtaaaagtgggcccactttcccggtagcttccccagcacgttaatgttttacatcaagtaatagccgctgatcaccagctaccttagcacagctgaaatgagagagctgcaggggagccaggactatcacattgccattcaccttacattctttctgttggtgaccttgggtcatgtgctttttcttggaagttttatgtccccatctccagcatccttggacatttgtccttggccccattaatgtagcattttcaacccttccttatatttctctccatcaagtgacctccacctttcaattttttttttaaggaaaaggtctaaatttattgtagtatttattaggtatgtaacatgccttttaataggtgctaaatttttgttgttgtttgtttgttttttgagatggggtctctctctccatcgctctggagagtgcagtggtgcaattatagctcattgcagcctctacttcctgggctgaaaatgatcctatggcatcagcctctcaagaagctgggactagaggcgtgtaccaccaggcctggctaatttaaaaaaaatgtttttatagagatggagtcttgctctgttgcctgggctggtctcaaactcctggactgaaggagtccttctgcttcagcctcctgagtctcaggcactataggcacgagctgctgcacctggcttacatgctaatgttatggtgaggatgttaggattattactatttttgtaagttatgtggctttgagaattcttccctaaactttagttttcataagctgtcttattttcagcactcatatttgcaaaatgggacacttttcaggaacagatatgtgatattatagcagaaattcttgcttttaatagtttgtggcttgtagttttctttttaatgacttcttagtggatggaaattcttaattttactaagctgattttattgatcttttatgctttctgtgtctccagtaagaaatcttttcctcttccacatggatagcaaaaatgtattctatattcttgttctccaacagctttgtagttttgcctttcccatgtaagtccttagttcaactggaattgattttcaggcagtgcatatagcagaagactaatttcttttttctccatacggataaaccagttgtcctagaactatttatcagagagtctgttctccccctactgatgtatggagccagttctaaccattaattggatttgtctatttgtttgacttctctatttcatttcactagtttgtctagtctctttatctatactgtatctttaaagttgtttatgtatgactgcttttgtcatctgtatggcagggtccctagtttgttggtgttcttgaagagtgttttggctctccttgggacactttacttccatataatttttagaattgggttatctagttctacaaaagaaatctgttgggatttggattggaatagggtcgactaaatcgttttaaggaaaatgtacatctttataatactgagttctctaatccatgaacatggtatgtatttcctttgtttacatcttcttttatgtatttttataaaacattgtagttttctgtgtaatagttttctaccttttagaagatttattcttatatattctatgtgttttgaagcttatgtaaatggtatcttttaaaatttatatttttctaagtgctgtttgcatgaatatttttgtatcaatagtgagacttaaaggacattttgccctaaggtatgccatattttctaccccatggttatcagggatgctttggcatgaggatggtggcttggtaattttagctgtttcctctctccccatatgcaatgtaaatgacatgcatttttaacttcagccagtatagtaacacacttattgataatctagaagttgctagcattgcacagagcatcctggagtagggacaatgttttctcttttcctctttgtcatttgtcatatcattttctctttccttcctcttttttttccccccttttcttggcttcatcttctgtatcattttttttttagttgctatttgtggcatatattatatttgtagatgattattattaattcttttaaagcatccttgatttgatgaattatagatattatctgatccattgtatcctactcttagaatacctgcttcttctggaaactctacagcgggggttagcgaactttttctgtaaaaggccacagagtaaatattttgggctttgtgggccatctggttcctgttgccgctactcagttcactgttgtggcacgagagcagccgtgagcaatacataaatgaatgacgtggctgtgctccaataaactttatttacggacacaaaaatttgaatttcatataattttcatatgtcatgaaatattgacttttccaaccatttaaaaatgtgaaaaacactcttggcttctgagccttgcaaacacaggcaagtgccgggggtgggtggagtttggcctgaaagccacgcacagttcactgaagcctgccggagagcactctgtgtgtgcctctaactgaagactgactccacacacttgtcattgactggggcatggttaatggcttctttttgacccctatgaacataaattgaatctttgcaacattaaggtacaggtatggcttaatgaaaggctgcctttctaagtcagttggaaaacgagtccattttaagttgatctgaaatacttagagtttagtaaataaatgagctatatcaaatatgtgtaacactgaaggctaatttctttcagactctgctttgaatcgtgttccagtaattggggcaacccatagagatggttttgttttacttccccacactgttcctgctgtgttctgaatgaggaaagagggatttggaaaggttaagtgatttcactggagtcacaaaacgtgcagaaattggaacataaccagttcagtccagtgccatttctacttttgtcgccttgcctctcctgcattcttctagaaaatttgagtctcccgaaagggtagacctttgctaagtcaatggtgcagtattgataaggctgccccagactgccagttaggtatctggttttcccgttgatttcactctgtctggatgatcttccttcctggctagacagggatcaattttcctgtttccttgcatcatgcctaccataatggtgcaatttattttcttgttcaatgcttgctgaatactacgcaagtcagagacagcttgctagggggctggaggtgggcccaataaaatatcatccctgtttctcacaggagtttataatatagtggaggacccacaggtacttaattaatgacaggatacaggaactcggggagggagacactgctgagttattgttcatgtatggaaaaagcttctgtaaaagaacctaaatatcatttatagaatctagcacactggcttcaatgctgatagcctgtcatttaatcatcatgccaagtactttgcacgtggaaagaagacgattgcaggtgatgtcgcctccctaattgtaggttgatccttgaaggtttatttttgagattcagtaattacccgagtaagcagcatgggtagaatttttttgcaatgccttttttcacagttttgctaaaagaacttccactttaatactttactaatgaacacaggcgctctttctgtagaaggagagggactctgagctaggagctgatgctcctgttgtcactcctgaaaagaaaagggaggaagataactctgttggtcctcctgccatgctgtttctggagcctgtcctcccaggggtgcaactgtcctgtttcttctcacgtaattaggaggtgactgacatggagagctgtctcctttaggcacagggtgggacctgtcttattccaaatgtagatttagtagtactttggtacccggtggtgtttgtccctcttctctgtccagacaagagatttccttctcctttcctgaatttgtttttgacatgaatctttggagttagaatttctctctctgatggacggcatcgataggatatttaggcatagttaaatcgtattcagtatatttcatatctgtaaagtctaagggcctggacagccattcctcactgagctattgctgttactcaaatgagtttgggagttctgacactgatttgttaaaggtcccttggaacataacccgtttgttaagttagggactccttgtaaccatattgagaaaaccaagccccttagtacgtgtattagtccattttcactctgctatgaagaaagacccaagactgggtaatttgtatataaaaaaagaggtttaatggactcacagttccacatggctggggaggcctcacaatcatggcggaagtcaaaggggaacaaaggtatgtcttgtatggtgacgggcaagagagtgtgtgcaggggaactcccctttatgaaaccatcagatctggtgagacttactccctgtcacaagaacagcatgggaaagacccaccccacgattcagttacctcccagtgggtccctcccaagacacaagtgaattgtgggagctacagttcaagatgagatttgggtggggacatagccaaaccatgtcagtgagtgatttgcttgggttcattctgtttctctgctccctgtgctgaagacccatctccgtggcccacctcgcccatgcagagagcacttcatttatcgtgggctcctgcctttcggccagcaccttctgtcgggtgtcgcaggatccttagtaacatgcaggaagggaaatgagaggaaagaacaatgaaataatctttgatcttctccactccatgtaacctaactttttatgtggtcaagcaagataagctcctatctggcataaatatgtgtgactacatttatatccctgcttacaaaatcattctaaaatggtaatgaaatattgcttctccctttctcttccggcagaaaatattctaaagaaataagaattttgatgaggagtggttattgaaaggggcatttcggactggttttaaatctcagtaatttattttattggggttattgaaatactggatatactgacagaaatcatcaagagcttatggttattggataagtgaactctaggttgtggttatatttagtgtctaaataaggccctattttattacaccaccctttctttctctttttctgtctctctgtctctctctctctctctttttagtctcagattaccccatctttccgtggtggaaagaataatggttgcaaagtgagtaggaaatttatttctctgtactcatctggcatgaattgtttgctctacataaattgatgaattactgcttctaaggctgacataatagtttttgttttgttaaacaactataaatttcatctaatacagtcttagtgttaacaggaagaaaaccataagttaatatctgctacatttcattgcttaaaaataattgctagtagtaaagcttcatttttcacaaacataatttgatctcaggtaattgatagaagaagaattcagggaatttgttcagggtctgtttacaactgactttttcaagaactgccacatgcaataatccaaatgcattctggttatgaaataaagcaggcagaacttacagtcagcctcagaatgacttattgacagctacaggtgcagcatttttttttttaacattgtaacccttttgcaaagtttttattgaaatgttttatgatatagtgtttttgatttgtctatttgaagaatcatagaagacaaaaccttaggaactttacttattctaaatttcctgttctgttattgataagaaagaaaaagagagagagagtgagggagtcagttattcaaatacacctcctttcattcctactggtgcttacaaaccaaatgcagcttgtattttaggcgcggggactcctcagctccacctaaactgaggagggaaaggtatgtcataatttttgttctttctcaacagttttcctttaataacaacctgatttatgatgttgaatcatgatcctcgcactttggaatgctccttgtaatcaatcacttttactagaccttctttctcataaaaacaagaatcaagccagttaattgcccaggcatgcatctctgcttacagaatagtcatggaaaccctggcttgtcatgtttaggaacttcccctgggttatgccaagggtcaagggttgatgtcacagccacgtttggagctgtgagctcccactctgctcctcagcatgtggagtgacatttattctctttgtggctaactagttaatgtgaatccccacagcattgctattgaagcaaataccatgactggggtaatagtaacattttgaagatgaattcagactataagaactgagtttgttgctgaaatatttcaactacatgagagaagagggagggtgccttgtcttattagcaaacaagtaactatctggttgtaggttgtacagggactttggcaaaaaaggagggaagctgaggacacaggcacgaagatttaggttggaattaagagggcattttccgcaagtggagaaaggaaagcgagttatcaaggtaggtcatggaattaccttgccagaggatttgtgttgttttctggtagttttctgttgttatctggttggaattgtggacctatgactgggaccatattgaggcttatgacggtctctgtgcttcccccagtccacacctcccctgtcccttggggtcagtggaggttctagtctgcataactatgctggattagctcctgaggtctcccagcccaaaacggttttttaaaaaattctacaccagtggttttttttccccttcgatagtctagagccacgcagttctcctcccttttctttcagcagcaccaggaaaggctggaatggggactcctagcatctgtagagaggcgtggctctcatactaggtgacttctggggagcccatgtcaagaaataccagtttctgcgtttcagaatagtaaatggcccaacttggagctgcagctcctccctctcattgcagtctctggtttgtcctgtggaggcagcggagatgcccctggctggtgttccgcgaatttgccggccccggggacctgcccccactgtctcagtggaaagtgtgccactaactgccgatggctgagtgtgcagatacagcccaggccccttcaggcctgtgggcctccgtgcctggactttgttctagtccctcccgggtttcctccgctgtctcatgagttcgggctttcttcattcctcacttgatgattggaagagctgcttgacccatcagcgtttctgtggcatctctcctttcaaaacgatccctgtagagggactggcaactagtccatagtgtcttgctagttactagtgtctcacgctgatttgcacatgacataaagacgctaataactgcctcatgctgatttgcacatgacgttctttatgctgactattcccttccccgagactttcagtgaaggaacttctgttcgttgcaggcatggttctcaactgcctccatcgggaagcatcctggccctggtgccagggcttccacggtatctggggtttactccttccttcactgagttacctgcttacattcctgttttccatatgaaactccttgaacataaggactgtgtcttaatgatctttattttctctccaatatctggacttttgtacgacacaaaggaaaacagtcagcctgtgtgttttcagtagaagcaatttatcatctttctaactgtataatgctaaattccaaacagtctaagcagctctcttggagtttgcagctaatgacagaaatagtacagaaagtcatttaacctttaatccagtgctctaactcactaaatataaaacattcttaaaaatacatttgtgcatttgccaattgtttattagatttctgctcagtgccagagacgatgctgggcctggaggagaaagtttgaacaagagtaatgcttttccatcctcacagaatgcagtgggctgtcagaagcggtagggaacagctgggcagatactgtgatgtgtgacatacaccacatgggagggaaattcccgggctgggtgggcaggggttgaggaggatgttctaaagtatgtgtgaagggggcagtgtgaactgcaggcacactgaatgagaagcctgagggttgaccaggaatgttgtcaaaagactaccttggaagttggagtgaacgactcagccccatgaaatgagagtgggagtctgtcatccatctgtggcagatactccctaggatatttgttactcagtgtgagtgtagcctgcttagtctcttttaatttttatttgttctttatttcttaaaaaaaaaaaaagctggatacatgtgcagaacgtgcaggtttgttacataggttatgtgtgccatggtggtttgctgtacctgttgacctgtcctcttaagtttcctccgttccccctccactccccatcccccagcaggccctggtgtgtgatgttctcctctctgtgtccatgtgttctcaatcttcaactcccacttacgagtgagaacatgtgatgtttggttttctgtttctgtgttagttttctgaggatgatgacttccagcttcatccatgtccctgcaaaggatatgatcttattccttttcatggctgcatagtattcattcctttttatggctgcatggtgtatatgtgccacattttccttattgagtctaccattgatgggtatttgggttggctccatgtcttcgctatagtaaatactgctgcaataaacatatgtgtgcatgtgtctttaaagtagaatgatttatattccttagtagaatgatttatattcctttgggtatataaatcattctactataaagacacatgcacacatatgtttaatatataaataaatgggattgctgggtcaaatgatatttctggttctagatctttgaggaatcgccatactgtcttccacaatggttgaactaatttacactcccaccaacagcgtaaaagcgttcctgtttctccacagcctcgccagcatctattgtttcctgactttttaataatcaccattctgactggcatgagatggtatctcattatggttttgatttgcatttctctgatgatcagcgatgttgagcttttttaaatatctttgttggccacgtaaatgtctgcttttgagaagtgtctgttcatatcctttgccaactttttgatggggttgtttttttcttgtaaatatgtttacgttccttataaattctggatattagccctttgtcagacgggtagattgcaaaaattttctcccattttgtaggttgcctctttactcttatgatagtttattttgctgtgcagaagctctttagtttaattagaacctatttgtcaattttggctttcgttgcaattgcttttggcttttttgtcatgaagtccttgcccatacctgtgtcttgaatagtattgcctaggttttcttccggggtttttatggttttagaataagtgtcatgtggcactgagaagaatgtatattctgttgatttgggctaatttttgtattttgtagtagagatggggtttcgccatgttggccaggctgctttcgaattcttgaactcaggtaatccacccgccttggcctcccaaagtgctggggttacagatgtgagccaccatgaccagcccaaagctacattttaatgtaataatattttctatgcagtagttgttcgtaatcctttcagggtcatggtgctctttgagaatttgatgaatccaatgaagcttcttggaagaggtcttagacccacacacacagacacacatatacacacacacacacgaacacacacatatgcacacacacatatacacatacatacatacacacatacatacgcacatatgcacacacatatgcaagtacacgtatacacatgcacatacgcacatacatacacacatatacatacacatgcatgcacatagacgcacatacagacatatgcatacacactcacacatatttcacagccttgtatttcattgtatgggctcataatccctggggcgtccatcccagacctgttgatgagttaagaacctttggtttagaggaggcaataactggtcagactgagacttcaggaataggcctgtccggagctagggaactggcctggctgttgggcttttgggtaagtgacattccagcagttcacatgtggtgacccaggatggagagtctgagcatcagttggactagatcacgtgcacagggtggaggtctcagtctgtctagggggtgctcagtacagtgagtggacgtcatggtcagggtttggagcgagactcgaaggagaagctgcaagtacagagtgtgttgaccattcttctgctccctggacataccctgcagaggctggctgttaggggaatcccaagagacaggatctctccagttgcttggaattccaattattttctgatccaaaaatctagcactcattggtgaaggacaagctgcgagggcctctgggtgctgggcgagcagccaacagcagcacgaccacctccaggcctcacctgcgagccccagtgatggtggattctgcctttgggcaaaagtgagagccccctgagtggagaatgtgcatcagcccgtggtgctcccactgtggaggtggtgggggtgctgataacagggagggcgtgggaggcagacacggattgcagatactatcctcaggtatacaggtgtcgaggccacattttcacccaggtcacactcttgcgtgtgctgaatgtgtgtgtcgtcgtgaagtgaaaatttatagcgaatttataatttaacactgaattcagttttctcttcctatttgaagcaattacatgactttgataactgtttagcttttgtttcaaaattttaaaatgtagcattaaggaaaatctctccaactagttttttaaattgccttgtttctctgcagtagctcatcagagtggttggggtcattttacccccacccgtgatggcctcctcatcctcctcctgcttctcctccccctcccattcgccctttccctccttttctctctccctcttttcctttatttagctctgagcccctgcccagccctgtgctgagaaccttcttgtgcatggttatttcacttagtgttcaggaggccctaccaggtggtccagctagtaggcttgttttacaagtgaggaaacacacctggagaggttaggcagcttttctgatgtcacacagccaatgtggttgtagctgggactccaacccaggtagtgccatctggagcctgccatttcctgtgttttgcagctttctcagtgagtgcaaggccagctcagtcttccttctgtgcactctcaaaggcatggcctgcaagagctgtctgatgactgattcattgctgttttcccttttctaggagtgtttttattctttttgcctgctgaacctttagaaaagtaacggtagggcaatgtgttaggattctccaaagaagtagaaccaatagaatgtgtgtatatatagatactctcatgactgtggaggtgtggtgagtctgagctctgactgggcaggccagcaggcaggggactcagggaagagttgcagttccagtccaaggccgtctgctttagacccaggaagagccgctgctgtgatggaacctgcaggccgcctgctggaggattccctcttgctcaggggaggtcagtcttttgttgtagccaggccttcaactgattgggtgaggcccacccacgtcagggaggacggcctgctttactcaaagcccagcaattaaaatgttaatctcacccaaaatcaccctcccagaaaaatccggagtcgcattcaaccacatatctgggcactgtggcccaggcaaggtgacataaaattaaccatcacagacagcaacctaaatactgttgaacaagaggccaactcattttgtcagatacctaagggcatgttaatgtaaactttctgcaagtttgtctctttctcatagacctaacgggaatattgggaaaaatttgaatggaagttcttttgcttcaggaaagaaagtaactttacaggaagaagcaagtcaagtatgaaaaatagagtgagacctaggagaataaaatctttaacaagcaagtgtcttattccattgaacttagagccctggacctgtgtgatatgtcaattcagtcttgacagtttttctgcagagggagctaataaaaagaactgtaagaattagttttttttctttttagtggagaatggaagaaaagtggctgactctttggaaggtaattctttaaaagcaggaaaatgtttaaagcaggagcagtaacatctgtgaaagtgagctattggcagctagagaaggactggagaaaatgggcaagaatgagagattccatattttattgggtaaaattctttagccagtgaacagtgacaaggtgttaaatttcatctgatagttttagaggttatttatcttgtagacttttaaagataccttgcagagtggtgtgagttgtgtgctttgagaaagtcgtaaatggtttccatctctgtggcatttctttagcaaatcctggttgtttctagtgctaagatcttcttgggaacttcagagaaagcgttaggtcttttgggattaaagtcctgttgtgtagtacctgaattttctttcatctctgagtgtttcccttgtctgaaatgaacagtattggtgttacctaaggggctaatcatacagcagagaactccagaaaaatattaactgagtgtctttaccacacaagatactaagtgccaaaacacttaaatggactgatacctggctttctaggttacacatgctgaaacgaacactgaaagtgataattcacttatgtaagcagttacaaactatgcaaatacaaaaaaataaaaaataaaaagaaatggcagtacatttgtgaatgcttgtggtgtgctgttagttgtattttagtgaaaggtctgtgcaatgaatattatggtaacagtcgctcttaatctgaattcagcaagttgtatgtcatcaaaagattagtgaaacagacacaattcctaaagccgtctaagtctgccagtctttccttcctgtgacacaagttcgtctgtggcctacaagttgttggaggtgtaacctattatttgttggccagttgttggaggtgttgggtgtgtggttttggacacagtgggcatgggtggtcccagtctcctggagtggacagccagacgaataccgtagacacaggaacacaaacatgttggagcgttcgtcgtatttctgggggttgcagctttgtctcagtttgctgtggctgaaccaaggaaaaaggcagatgcagacttctacaagaattataattctatggaagattttgaggagatgaggaaggctagcatctttcaggatgcaatgtaattttggaatataaggaatttatttgggttgaattacctagaagtttgtcactgacctgtgtttctgaaccatgaagcatagatatgtgggctaacaaatagtttctcttgataaataaactgttaacaagtatatataaaaaagagtctatagagaaatgtatacaggggatgtgaatagggagttcccagaagggaaacctgaattgtcatagtgtaatgatactaaacagcactgatgatgagtaaaacaaaaaagcaaaggaaaaagacagtttcatatgcttcagattagtgaaaatttaagaagtctgattatataaaatgctcccaaggacggagagcactggggatgatgaggttgtaagaatgactttggagagcagtttgccaataactaggaagtcctttgctgttctgcacctaggaattaattttagagtaacaatattacaaaaattaaccatcagaattaattttagagtaacagtgttacaaaaattaaccatcagaattaattttatagtaacagtgttagaaaaattaggagtctcatgtcagatttcacctcacttgtcctatcagcagcatttgacaagattgattattccttccttcttgaaatatttgtattacttggaaatagatgtagctgggcacatggctgtccagatagagtctagatacttgtacaatgcaaggtgggttctgcccagtcctactgttacatgctagggtcagagataaattctacaacatcatatattacaggtttaggatgaggtttcactggaggaaggtgagatgtacatggaccaagggtttacgtctcatccttttatcccatacagatgcactgggtgagttggcgtgctttttattggaaggatccttccattttgtgggtttcctttcttgtaagcatagaaaacagccatgatattaggggataagcagtaattacagtaccttcccccaccctagcagtggggaagtacatatttcatggggaacctgaatgaatgtgggttcagtacctccagctgggctctgtcctagctcactgctccagaggactcctggggtccctttgggacgtacctcctattgtactatgagatgtggccatgtccagcgaggaagtgatgtctgtgatatacatcactgatacacatcagcgtaactgatgagatggaaattgttcatctttgcttacgttctttccctctttccatgggctgggatgtgctgaaccatctgtttccctgccctcacttagagcagagtgacaggattgaaagaccctgggttcctaacatatcttgggaagcagagctctgtgtcaccctatatcacctgccttggatgagagagagagagagggagagaaagagagagagagaaagagaaagagagaggaactttgactgtgcttgcacctctgtggctgtgtttttgggtctctttattatgcagtctagctgtgatgcagtatctcatagtcatcttaatgatcttaacgactatgagggccagtggagcttgcccttggtatttgcatcccttgaatctgcctcatctcagtaaagggcaactccattcttcaagtgcttgggccagaaagcctcagggacatttctgtgttctacttctcttgtagcccatcagcgaatcccattagctttaccttcacattaaaaaaaaatactttgaccaggcacagtggctcacacttgtaatcccagcactttgggaggccgaggcaggcagatcacctgaagtcaggagttcaagaccagcctggccaacatggtgaaacccggtgtcttctaaaaatacaaaaattagctggatgtggtagggcgtgcctgtagtcccagctactcgggaagctgaggctggagatggtggtgggtgcctgtaatcccagctgcttgggaggctgaggtaggagaatcgcttgaacccaggaggtggaggttgcagtgagtcgagatcgcgccactgcattccagacagagtgagactcctttcaccctaatgtcatcactgtgatagggctgtgtcatttgcttccaagaattcttagataatgtctttgttaaatcctattctttttttttgagacggagccttgctctgtcacccagcctggagtacagtggcacgatctcggctcactgcatccttccaggttcaagcaattctcctgcctcagccttcctagtagctggtactacaggcacctgccaccatgcccggctaatttttctatttttagtagagacgggtcttgaactcctggccttaggtgatccgcccgcctcagcctcctaaagtgctgggattacaggcatgagccatcgcaccccacctaaatcttattctttacaacaaaatgatactatttcttttcttaatcatagaagtgtatttttacaactgaaagagtctttgaaaggttgaaatgaaacttgtcctccaacaatctttatatgacaggtactaagggatgtgtgtgtgtgtaagtgtaatttttctgacattctttacaagttatatcttcatctgggttacattcattattaaagacagcaatacttttatctatgtgtttgaacctcagtagtaggtagcactaggaacttgtcaatcctgttgaatcattttatgatctatctttttgtttgtaggaacaatctaatttgaaccttatatgaaaaattaatgtaggttctcctttacaaatctccaagggaaagaactctgtcatctttttttcttaatagtaagagcaggtgcttccatttatcattcaaggtgtactgttgcctccttttttctttagcaaagtcagtgttaaaaaaggcttcccctgagaagtcaaaggctgctacctgacatctggttgagaaggctcggttctcttgtgagctgggaggagtttcagtggattaagcactcttatttatctctttttcctccagagaccccattaaaatggtagggaaaaataaaaagtacatatatcaacaacacaaagaacttaaaggccaccagcatggaaaagggattttacaatgtttctggcagcctgcaagctgataaggctatgtgactactaaattagtgtgggggctgcagctggggaggctcaccttggagactgaatgctgggtgggtaggagtcccacgtggggctgaaaatcacagggttccatgggatgcctatagtcagatcacttcacggattctctccttcttccacccctgccgtgggtacaaccaaggactagaaaccatatatttatccctctgcctcatctctgaagaaatggactgaattgtctggggagaacccctgttgctagtttggaaggcggcttcttagaaggggaattactcccatgcccactctctgagtcagacccgtctgcccaggacaccagcctctccaaggtttctgttgtttcatatttaagtatgatgcatgagcattgttggccagatattccaggaaagcttctgatcaaagagggcaggatgagatgaagaaacaacaaaacagcccccaggaatcagagaggacccggggaataggggaggagaaccctattccgtaatgagaggttttgaaaaggtcatcttgttaaagaaaacgttttagaaggaaggaactaccaaaagcaagaaagaaacattgcaaacgaaaactgtgacccatggaatgaattcaaagaagcattgattggaagtaagttcagaaaattgcccagaaagacaacaaaaaatgaaataccctgtgtgtttaaatgctagcacatagggatgggactcaaactcccttcctgtgggctagagtgtgagtgaaaatggcctttctcttcattgtaattactctccccatctctcagagaatgggtaggcctggggcagctggtctcagcagacctgtctgttctcctgtgatgtgggaaggcattgaggagcctaggctgacagtgcttgtcctcctgaccccagcatgggtctccttgttcatcatctgcctgcatgggcagccctgaccaagggctttatactcacagcccggtctacacaggtcacgtccctgagaggtgacccggctttggactctatgtggatgtgcacttgatggggcttgaaatccaacattagtggtattttcccaaattctgaaaaagtgatgctaatcttctgcctttatatgggactcaatttgtagatagcttgctttctttttctttttttacagacatggtcttactctgttacccaggctggagtgtagtggtgtgatcatagcccactgcagcttcgaactcctgggctcacaccattctcctgcctcagcctcccaagcagctgggactacagccacccactaccatgcccagctaagttaaaaaaaaaattgtagagatggggtcttgctgtgttacccaggatggtcttgaacttctggcctcaagagatcctcctgcctcagcctcccaaagtgttgggattacaggtgtgagccaccatgtccagctcggcagctttataatcctaataaagcatttgtgggatttgggtccatctttaaatgtcctcaagaagcatatgtgtgtgtaactcaaactcagaacttgagttctgaaacccaagttcatgattccttccttcactgtgatgtgggcacttctccaaagtgaggtattagtggaatggaacttggatttttaaaaggtgtagtggaatgcttatataatattataactaagtaaaaccttgaaaaaatgttcatgagaatgtggtagaagtttctttcttttttttttttttgtttcttatgactttctaggagtttgccttaatgagttgaaagcatgagcgatgattaccaagttgtgtgtaaaccttcctccacctgaaattgcagagtgtttttctccctgatcatttctttcctgtcgtagcgttcatctttgatgccgtagttgggcgcagggcaggttttgagtttcctgatgtttcatgtgtggattggtccttcaatttgaagaataagataatgatcatagacaaggatttggcttacagctgagagtgctgagttggagtcttggaagagagacgtgctgcagaataaagtttatagttttaaaatttctagttagaagtttaaatggtcacactgagcaatgccaattagcttccattgcagtgaattctaaggacttgcaaggcaacttttatttaccagaatttaactgaattaatcagtggttaaggtaactccatggtctaggaattgtaaattggttatacttagtttttattttatagcaatatttattgtaataggtttatggtacatttgaatattagagctttgagagctaaatgttaactgatatagtttttcttataaaattagcaagattcttgagaacgtttcttttctactttttaacctaaagtggtctgtatacgtttatggctttatagatacgtctaccatggagagcaattcatttaggtagtctgtggctcataaaagattgcttgagtcttgtgcagacacatataaaggaaagctataggacctctgggaacttgaggctcgcaagatgtaaatgtcagagccgtccctagagctcccttgctatgactttgaccgtttaaatttcagcattgtgcagtgacttcatagggtgcttgcatattttaaaaattttcacttaactgttaacttggattatacgcatgttagaaacaaccctgtggaaaatagagctttcttcccgtagtggatatagacgtctgtgttaggcacaggaccatttatcgctggattataataattgttcttcttttgtaatgggataggaaatgcatatttatggggtacagttgtatattttgtcctaatcttgaaacttatgtgagtcattttcatattatctccatcatgcctgcattttaaattactgatttatctgtttgcaaaagctttggagaatcagagaatctactggaaagactccatgtgagattgggctctgaacacctgggggcttgaggctgtttctagtttttttttttttttctgagacagtgtctcgctctgtcgcccaggctagagtgcagtggcacgatttcggctcagcctcccgagtagctgggatcacagatagctgccaccacacctggctcatttttctatttctagtggagatgggggggggggtttcaccatattggccaggctgatcttgaactcctgaccttgtgatccacccgccttggcctcccaaagtgctgggattgcaggtgtgagccaccgcacctggccgctgtttctaatttttttccgtgaacttggtcaagagttaatgacgaagaagcacctgttagcatagttaggaggaacaaaacagggtgaatgaaaggtctttgtaaagcataaaatgagtccagattttagttcatttggcttgtatatcttgttttcgtctcagtgaccctagacatgcaagagggccacttttaaaaagggtgtagcctttgaagaatgatgactacatctataacgaaggaagagaacacaagaacacagttttatgctcagcctcccaacgtgctgagcgtacaatatttttgtgtttgtatttccatgtgagtatgtataaaataaggaaggtgacattttgtttgagaaaaaatctagtgataaaagtggacaaacagatgagttattctttattataagcggggtgaggctgggacgttgccatataaggtaaagctggactcggccttgtttgcctgagttccgtgcatgttggttttgctcttggtgtgatgatcatccttgtgcgtgggcggatgttgactgagaggcacgttagtgatgaagcagcaggtccggccactgcttggcttgtatcttggtctccattctactggctgttctgtgaaagctcattggaagtttcaatctagaagtcatgggtatgaataatcaataaccagcagattaaaaagatatatgtaataatttagtatgtttataataaaacaagagctaatattaattggttggtgtgtacctgggttggttatattttatttgcatatgtctgtcctttagtccttagaacaccccttataagcaaaatatcattagcaacctggcaccctttgattggctagaaaagagtctaagagaaattgagtaaattattcaaagtcatgcatccagtgatggtggatcccccgttggggcccagatctgccccacacccttatggccaacttcccttttgtagtaattccactgctttaggtttgagccggaagggttgcatcaagcctttgaagaacctaaacaatgcacaaactacttgggtcttggaccttaaatgggggctgagtgaagtcctgggtggagcccgggctgcccacgtggagggctggctgtgatgggtggttcatctggggctagggtcttgctgtcatttatgctgactttgcacatccatctcttggtgccctgggaaggctcaggtccctcagggatgcaggtgtagcccagtggggcctttgaagatctgtagcttgggagacatgccaaagagatatgctttcctcaggtcttgggttctaagcacttgtagaatgttgccctccacagtctgatacttctttttcaaaagatgccttggccgggtgcggtggctcacgcctgtaatcccagcactttgggaggccgaggcgggtggatcacgaggtcaggagatcgagaccatcttggctaacacggtgaaaccccgtctctactaaaaatacaaaaaattagccgggcatggtggcgggtgcctgtagtcccagctactcgggaggctgaggcaggagaatggcgtgaacctgggaggcggagcttgcagtgagctgagatccgccactgcctccagcctgggtgaaagagcgagactctgtctcaaaaaaaaaaaaaaaaaaaaaagatgcctcaaatacattccttccttgttcagagggctgtcacccctattttgagtcctatcacttttctacttggataactgaaacagcctcagtttccctgcttttagactcttttctttccattcaaacccttatactgttgccagattcattttatacagagatgtcccatttgttaagcgtctatgttgacttcctgggtgtccatagtttattcctaccactcagtattatttcccagtgctgtgcgcttggagtgtgccctagtgtgaccatttgcagtgcagtcgtcccttgagatctgttgggggattggctccaggacccccaaggataccaaaatttgcagatgatcaagtctcgaacagaaaatagtatagttcacacataacctatgtacatctttctgcagaccttaaatcatctctggattacttatagtacctactacaatgtagatactatgtaaatagttgttacattggagtttttagggaataataagaaaaaaaagtgtacatgttcagtaaagatgcattttatttcatatatttttgatgctcagttgaattgaacccagggatggggaacccatggatatggaggggactacttattctccccatttctctatttctccatttcaccttcagtccacccctcttgttattttgtgcccatttctctgcaaattccttcttcttctgaaactgtataaactgttcatgtaattcggggcctggtttgattttcccacctggaaagcctttctctgatttccctagcctcactggtttctctctccttggaacctcctgaattgtacactttataatttctttgtggtttgtgaaaagtttctaaataggctgtaagacttcggattctttcatctccttggtgcccaagcatgtggtatgtgtcaagttgctacttagagacacattttcagtctcagttttagtatttacttaagcatggtgatgaaagttaagaaaaacattgaaatcaaacctacatggagaaaactgctgtgattttaagttgattggatactttgctgctgtgttgaagtgttttttttgttttgttttgtttttctttctcctttgtcttgccagcaatcaaagagaagtacacagactggacagaatttctcatacgtgacttgactggttcgaggacagcacccgccaacctcctggaaggtgtatgtattgttgttatacatctaatgtatctctgaagcaccccagttacgtgagctcagacctgacagcacctttgcatatatccttcagcagatgcgtgctttctgcagacactgccatccaaatagcctcccttcctcttttgtcctgaattacttaggtgactgatttgaatggcattgatgaaacttcccctgtgatgcaatcagcaaatggaaaatttgctctatgtgaatccaatttttaaatcacaatatgctaggatgtcttcctactgtcctatatctttaagcctctttcctatgtgagtgaatataaatcaaatcctgtagaatcactgttttgaacaggtgacaagatcatgtatgtgctaatatagtctcttggagtacattgataagtcgttccattaaatgttctattttgacgcataaccccaagatttgaacatacacacgttaaccaataattgaattaacttctcttgtaaaaacaagaggagaaatggcagatcgtatttcagtgtagccaaggaaattttaatgtattgaagaaaacatagtttaatctgaaatcttgatggtttatttgaaaataattttatgttgaaacatcttagtatgtatatgtagtatttgtatttgtataatggaacaggaagagaaaggcactgtgtcataagtaattattgaattacctagtctgtttttcttaagaatgcccctaaaaaggggaaaacttaatgaataacaagtaataaggtgtggattttgacagtatcatattctcttaaccttaaactttccctcttttcataaatgatattgacattttagaacgtcatagtctaatatagttaacgggttttgttttgtgaagattttgcctgatgtatttgttatatatcattagagatactattttaattgttcattaacaaatcaaaatgatgatagttcatcctttcaaaaggacaaattgtctcactatgttaattttctaaaacatatttgcctacaaagctggctgaacaaacacccttttcatatgctatcataggctaagaaggtttcttagaaggggcagtaattatacattctgtaaaccaattaccagcttaagtgtagaaataattttacatagtagtctaatttagctgatcattactgtgtgttagacatgtcattgacacacactcatgccttcgtcacataatcaaagtatgagagcattttggtcattagagtagcggccagtagagtaagatgaatgtctgggaaaccgtcatggtgtaaattgaatgctctgtattagaattatctgtctgttggaaaagtagaccgtttgctaccacgttttctaggtccaggcaaatttgggtagaactcttcttaaaagcatactgattgttaacaaaagcaattttatctgggaagggtgatttgtttggtgagaacttagcacaaactgttattttctattgacttgtgatttttttgttgttggatacggaatggggtacatggatgtgtgggagggaggaaagggaaggggtggggcatgggctgggcaaggatggggtggagggaacgccagactgttcgccagtaccttggatgatggtgtgaaaaaatattatcttctgctgtcatctgtttccatgagaaccttaaaataaagtttaaaataaggagttttgcttctgtttaaacagcctctgcgagggaaaggccctatagacctcattacagttggttccttaatagaacttcaggattcccagaacccttttcagtactggatagttagtgtgattgaaaatgttggaggaagattacgccttcgctatgtgggattggaggacactgaatcctatgaccagtggttgttttacttggattacagacttcgaccagttggttggtgtcaagagaataaatacagaatggacccaccttcaggtaagggccaaagcttttgctgctgtaaagtattttagaaaaagatgtgatattttcctggatgtgtttctagaaaatgtatgagctttctggtatcttttatatctgagtatgtgaatattaagcactttaacttcacaatgctttccatagagactaaaacctaagacctcaatcaatagtgttctcaaaggagaaagcaatgttagaggccttagggaaattgatctagttccttgggaatcactggttcagaaaggaaagacacagtagattgagacttgaggatattctccacgtttttctttaggaattttgatagtcttgtaagtaggttccgaaatctctggccatctgtgtacccatctctcagtctgtccattcaccaatccatccacctactcatccacccatctatccatttatctattcatccatccattcatccacctatccatccagcattcatctatttatctgaccatccattcatccatccatctaaatatccaaaccacaatccagtctgaccaagaagcagcattgagtagatagaccatcatgttttctcctggcatgtaagattttagttagcttcaaatgcactgtcaaatggctttgcagaggcttaattggaaagaatcctgccttatgctctctgtcatacctacctagttaaaaatcagcgtatttacaaaataaccattcttgaatgtttactatgtgccaggtgattttacatctggtacattgtttgttttgattctaaaaaaatgctgcatgtttgttgtgaatttcatttcacagtagagaaaattgagactggagttcagctagttgtccaaggtcccctgttttaagggacaggcagtgcaattcagattcccaggtgctgggcccctcccacccctcttaccggcctcctcttaccggcctttgaatgggaaacctcagaacagaaatactggattcttgtagaattagagatgccaaggaggaagtacgtattttttcagaaattggtgaatcttcattccggtgagttttgtagctgtatttggaataaggacatggctctttgctttattaaaatcaccagagaatttcctcccatattagttgccgatgttagtgttgagtacatgaaggagaggagttatatttatcttttctgtcactcagaggctctaattgaaaacacttcctggtcctgtgtcccgtgtgtttgcatttgcattaagtttgacaggcttagagacgcgtaatgtggtattttattagtattattgctgtcaaaatgttgagaagcagccaacacctccatctctatcctgagtaatttttgactctgatgacaaacaaagagcctgtcgtgttgtgaagaaggatgtaagcccgggtttgccctgggattcataacccagcaggaaaaatttactttgtgcgtaaagttgtgtgtatacatctctgcttagtatctaattgctttataaattttaggagcaatatctacttgccagtgtacaaatttacagcaaagcaaaggatgactagtggcttcttatgttctctgtgatgtttctttcctgggaagttatgggactcacgctcacgagcaggaatggaacatgcctccgtggaagcttaggaaatactcgcttatgagctgtctccctctttagataatttggggtctttataatatatgaataaattgtgtttacttgtcttagcattttctggaaatgagttgttcatttaactgaagacttcttgggggcccctgaagattctggaacaggcagggcatgatggctcacgcctgagctcaggagttggagaccagctggggcaatatggtgaaaccctgtctctgaaaaaaatagaaaaaactggctaggcatggtggcatgcacctgtagtcccagctacttagggggctgaggtgggaggatcgcttgatcacaggagaggaggctgcagtgagccaagattgctctgctgcactccagcctgggtgacagagtgagactctgtgaaaacaaacaaacaaaaaaaagattctggaaaagacattcatcatcaagaacttacttccccgatatttaaatcatcaacaggaaaggttatgtacaggaagaagaaactaaaaagtgacaagacactccaaaagtgtgattttgagttcctcagatccagtagtttcaagatggaaactggattctgctacatcattcagcagaacagcatccctgggaagagaggctgtactacccctgttgtacacatggggacagattctagtactttgtatttgtataaattgatttcaagtcccacggtgacttgtgtgacttacgtggtagcaccacttccttaactggaatctaggcgagaataaaacttcatacctgcatagaaaatactaggccgattttctcgttttcccaaacactatgaaggcactggaaagtgttctgcttccatgaccgatggggagaagtccagtgggaggggggtgtgcaggggagaagagcatactccccacgagctcttccctgctgccgggaccatctgctctgcactcccactaacaccaccaccattgttaaaaataatcatcctttagttttacttactatttatttatttatttttgagacagggtctcactctgtctcccaggctggagtgcagtggcatgatctcggctcattgcagcctcaacctcccaggttcaagtgatcttcccatcgcagcctcccaagtggctggaactacaggcatgtgccaccatccctggctaattttttaatctcttattttgtagagatgggatctcactatgttgctcaggctgggcttgaactcctgagctcaggtgacctgcccacctcagccttccaaagtgctgggcttacaggcatgaaccactccacgtggcccttgttttactctttaaagggtacagtatttctcaactgttcagcaaaatagaagagaaatgggtcatagaaagtagctaggaagttagccttcaaaaacctgggaaaaggaactagattttatactctccacctctgagaaacacagggccattgagcctttctctttttgccctgaatcagaggaaatagcattctggtgcttggggaaggaggaggggaaagaaaccaccttaccctgtaccatggggataaggatatcttgctgggctgctgagtggtgtaatgtatatcaagagattggccttttctagacatttaatctgtgatcagagtcttaaggttgtactttgattttccaaggaatgtaagtacgtcattgaggttagggtcgtttaagaagcccacctgctctcctatttctggatgtttagaaaataagatagacttttagatattcttgcagatgctaaggagatgaaactttttgagtttctttttctttctctatttctagaatttattcccttgtttttttccttcaaaattattttatcaccccctccccccatttttttagtgcttgttttagatcttggagtcaggaagtttctgaatccaacttaaatactttctgcctgaactattacttagtccaaaagtgagttggactacattaatctgttcaagctgccataacaaaatgccacaggctttatggcttaaacaacaaacatttacttctcagagatctggaggctggaagtgtgagatcagggtgccagtgtagttgaggtcccaggagggctcgcttcctggtttgcagacagccgccttctgactgtgtcctcacatagtagatcaagagagaactctggtgtctcttataaggacacagatctcatttgaggaccccaccctcataactccatctaactctaatcatctcccaaaggcatccctttggggttagggcttcaagtaagaattgtgaggagaaacatttagtccataacactttctctgacgtttactatcttttaacaacatagattcatctttcttcactggataggacctggaggagcagaaggacatagaagttttttggagggaggtggataaaagaagagttgtttctctaggtctttgtttattgatgattatgttatgcattactgcttcctgtggcacttattaggaaatgccccatcaaacccttgcacaaaaggagattgcctcgtttttcttgtaggcttctagtttcagaggaatcgggacatgttttaattgctcacgaccttcccagaaacagaaactggcatgatttactttattcagttacctgcaacacgatcattttaagaaaatggtcgatgttctttgaatggtactatttattgtccattaacttgctagtataaccagcatgactccatctcacggaatgcacatggggactgttgttctctgctggttgtgtcaggctgtcaaaactgcagttgattttcaccttttcatgaaagaagtctgccttgctgtgggctgggttcattccaggatttaacaccattggaaagaaaacagagaatcttcaggttgtaggacagaggcaggacccacctggcacctgggcttcttgttacctttgtctctggtgtggaggaggagagatggcatccagtggacagaggagttcatttttcagggatgacttggttggtctgccttcctgggccagcgtgcaggcaaccccactggggccagagcatcctctccgtgagttctcatagcttggatctaaccctggtcatgttggatttccattcctcctggccttaagttttttttttcttgtttgtttggtttttttttttggagatgaagtgcagtgcagtggcacaatctcagctcactgcaacctccgcctccagggttcaagcgattctcctgcctcagcctcccgagtagctggtattacagacgcctgccaccgcacccagctaatttttgtttttgttttgttttgtttttttaaattttattagaagtgaggtttcaccatgttggcctggctggtcttgaactcctgacctcaagtgatccacccacctcagcctcccaatgaaggtgttttttgaccattcttataccttctcttctgtctcagggcatccctcccccattcagagaccaccatcaagggtcaagggtataactagtcctgattcccaagcaaggggccaaaggtgtcagccaggtagatcatgcttttcctttttgcacctgttgggtcttcaaattctttctttggtaatccccattgttttctgtgagctggtccttttcctaccatgcccaggttgaactctccatctgcctgcccagcttgctggaaaggggcatgtgtttatggtccctgtcccatcaggagctccagcctgttggcaatttctctcctgatcctgcgttggcgtcctcagggctttgctccccggggtcccctgagtggccttctgtctctccgtggtttggatgcagtgcccacgagcttgcctgagtgcacaggtatccctctcgctctcatggagcagcttgcagggggctctgtgaactggtccctgtgcctacttttggggatcctgtgataagcagtgtcttcctgagtgcccccttctcactgtggacatcagaggccccattctttcagtctccacagaagtgtgtgttgaggcccattgagtgttcccaattacgttagctactactaagaagaatttagaaaggccaaactagaagaaaaaagttcagcagacaggaaacactagaaaggattatagacaatgcacacacgcagaggatgtgtggttgtgaattaccctttgtgtgtctttgtgtaagtaacaatgacttcgggcagtgcaccgatggcttggctagttctggcaggatctgatacttactgtaattatgactgaataaactgcggaaacaggggcttaaagctcaaggtgagttcaaaagctatgaggatcaaaatagatcgcttcatgctaaaaagcagacatgcaagaaattaaaaatacagtcccaaaggtttactgttgctttttaactgtgcttaatttcatattcatatcctaagcgtctgtctgaagtagcctgggttgatatattgaaggcataaacatatctacttccagtgagggcttctgcaaatcctattttgataaggtcttaaatctgttgagatcaggccataaaattctcctgcagtttcagcaataggtaaaaacagtgctcaacgtttttttttttccttttaattttgcattcagactgtgtaacctccatctgtaaatcttgccccccctcccactgcctggggaaaaatatgggcaacatgtggtgtgttaagcaacatttcaagtgtaaatattaaacttggtaaattttaatttaccttttaataattttctgacttacagggactatttttagcagatgagagcttagagatttagtgaaaatatgttgtcataactgcaaatgccagactagagtcgtttgtagtttagaaatgtatcagataataagttcctcatcagtgggcattgctttcctaggtgataggtggaattttggcccatggatgactgaaggtttttgctaatgtgattaataccattaaattacttacagaatgccaactaaatgcatacaaatgttccctgaagaagagctctattaagtttattcttcatttctgacagcagaatcccaagttgctatttaatttcagaaagtcctttcagcaggtggctgctcatggtgggtatggggtgtgaacactcacggtcactgaccgtgctgaggtatcaggaaagcctgggaattagcatgcaggaaagagtcacccggcagaacgtgttagtccttcaactcttctgtgatttgctgttgatacagaaatctatcctttgaagatggcctctgaatggaaatgtactctggaaaaatcccttattgatgctgccaaatttcctcttccaatggaagtgtttaaggtaagatgttgattcttagcaatgtatctaccctttttgagaataaaatcatctacaaagttttccggccgggcgcagtggctcatgcctgtaatcccagcactttgagaggctgaggtgggcggatcacgacatcaggagatcgagaccatcctggctaacatggtgaaaccctatttctactaaaaatacaaaaattagccaggcgtgtggtgtgtgcctgtaatcccagctacttgggagtgtgaggtaggagaattgcttgaactggggaggcagaagttacagtgagctgagatcgcaccattgcactccagcctggcaacagagtgagacttaatctccaataaaataaaaagttttccataccaaatccttttccacttgaaaaggcaccttcttaaccagtttccattttaaatgcttaaggttttatctgtttcatgttgctttttaaaaaaataatcttcataatgacccatattacaagatgctgattaaaattgtttaggtttactgactttctttgtagcatattgttatggaaatattttcaccccctcacttcctactacagaaacaaaaggaaatatagcaagtctaattttgacatttagtaaaaatgacagaaaatgactcatctcgtggtggttcagttttcttgatgtcccgaggttctgctaagtaccaggccttccaccaggtgctcccgtgaaaatgaagggcttgtgaaatgcatctccaccaaaacggctaccaagttctttacacttcaaaaattatgcttcacacttacgtgaaatagaatattaggttctggacaaagatggtccattcaggttcatccaaggaaatcataaaacaggcccatggagtgtgggcggcgacccaacaccattggcgtccttggacagttctcaatgtggttgtgacgggcagacatccagttgcttcccagccctggggtggcacgtgtctgcagagtcgtacaagtttcatgtagaagatgtacttaatgtggtacagcagagtttaaggatttagtaggggacgtgggcttcctggattttactgacacctaagtcctcactcagccttttaagcagctgtggcaaatcattgaccctttcattcagtacttcccctgtttgtaaaattggactattaagatctcccccttaacttagccatgtgattatgttgtgatgtttaactgaatgatgatttttacagtgtttgggggctcctgtactggaggaacagtgtaaatataatacactgttagcatgatattgaccgacagtgaagccgacagttgtggtggccaatgttgttattttttgcctcactgaccaaatctttctctctcctcctctttgtcttcctcttcctctccttccctcttctctcccttttattcttccttcctttaatactgtcctgcccttacaaaaacgatgaagagaaacagcctttaatgttggacctctcagctctgccacccccaccagagacagcctgtcctcgtctcccctgcccctttctcttcaccgtggcctcagtcatctttgaatgtgaatcaaatccaatcacatccttcacccttgaaaaaataaattttattttgacgtaccctatacacacatgtgaggagttgaaggagtgagccaatgggaaattacagatgcccaccctccggtctaagcctcggagctgccaggccagtggagcccccgctgcagccccaggtctgcctccctgcgggaccagggcacccggggcctcacagctgtgcgggtcctgcctgtgcctctctttgtggcgttccagcctgtgtatgcttccctaagtgggatgctgagtcctgttgacaggatgggaagtgggcaccgtcctcattgttcagagagggccctttccctactctgaagagggaagaaagctggatgtggtctgggcaccacactggctttgcttttcctcagagtggatgaggattcagtaggtgaagtcgtgagctaattttttttttttttggagaaacggtgtcactctgtaacccaggctggagtgcagtggggtgatcatagctcgctgtagtgtcaaactcccaggctcaagccatcctcctgtctcagcctcccaagtagctagaaccacaggcatgcaccagcacacctagctaatgtattagtttgttctcatgctgttagggaagacatacctgagactgggtgatttataaaggaaagaggtttaattgactcacagttcagcaaagctggggaggcctcaggaaacttaaaatcatggcaaaaggggaagcaaagatgtcctttttcacatggcagcaggaaggagaataagagctggatgaagggggaaggcccttatcatcagatctcatgagagcttactcactatcaggagaatagcatgggagaaaccgcctgcatgattcaattacgtccccacaacatgtggggattatgggagctataattcaaaatgagatttaggtggggacacagccaaaccatatcagctaatttttagattttttgtttctgtacagatggggtctcactgtgttgcccaggctggtctcaaatcctgggctcaagtgatcctcctgccttggcttcctaaagtgcagggataacaggtgtgagcgactgcacctggtctgtgagctaatcttaagaagacgaggggttaccacacttgcttctactgaagttgcagcatgaactctcagtactggaggtcacatcccttagaaatgtgggcaggggctgcatagtattccatggtgtatatgtgccacattttcttaatccagtctatcactgatgaacatttgggttggttccaagtctttggtattgtgaatagtgctgcaataaacatccgtgtgcatgtgtcttcatagcagcatgatttataatcctttgggtatatatccagtaatgggatggctgggtcgaatggtatttctagttttagatccttgaggactcgccacactgtctttcacaatggttgaactagtttacagtcccaccaacagtgtaaaagtgttcctatctctccacatcctctccagcacattgggacatggatgaagctggaaaccatcattctgagcagagtattgcaaggacagaaaatcaaacaccgcatgttctcactcataggtgggaattgaacagtgagaacacttggacacagggttgggaacaccacacactggggtctgtcgtggggtgtggggagggatagcattaggagatacacctaatgtaattggtgagttaatgggtgcggtacaccaacatggcacatgtatacatatgtaacaaacctgcacgttgtgcacatgtaccctagaacttaaagtataatttaaaaaaatacattaaaaaaatgtgggcgggggttggttggttcttgttttctgattttacaacttagctctcaggagcaggctgaagttcactgtttctttgcagtggaatgaatgttctcatcttgtctagacagctggaccaggagtaggacccaacttaggaatctttttagtgtagtcaaaataagctgaatattgttaacaatcttggtctggctgactttggcattgtgtccgtaggttgcaaagatgataaaatgctgtctacatttccttctcactaaaagtggctaaaaatgtctgtcttatccatatactttattgatagtttgtgtgggtgtagaattttaggtgagctatcatttgtctcaagaatcagaggttttggctggggcgttggtggctcacgcctgtaagcgcagcactttgggaggccgagacgggcagatcatttgaggtcaggagttctagaccagcctggccaatatgataaaaccctgtctctactaaaaatacaaaaaaattagccgggcatggtggcatgcatctgtaatcccagctactcaggaggctgaggcaggaggattccttgaacccgggaggcagaggttgcagtgagctgagattgcaccactgcactccagtctgggcggcagagcaagactctgtctcaaaaaaatgaaagagggtaggggggattagaatgtggtggtcagcccctggagtgtggcttgtgggctgcttcttgtcctgtagtatttcctctttggctggttttccagggagagcttttcagtctcccaatgtcccacctggggctccaggtctgactgccagcgttccaggagccacgtggagagaagagggctgggtgctggcctgcagtgttggttcctgccccagcctgttcagagaaggctgagacagggatcagggaggctgtggggggcgtctaactgcctctgcttcccagtcacctccccatgcttatatcttaagctcctgtcaaccccccggtttcggacatatctggtgggactcgtttcagagcctttcaaggcttctgtaggagccactgtgttggtgctcagcttttctgctgaaggcctgggatttggctttgctgaatgtgtgaaattactcacttcttcttcatcagcttttttgcctccttacctttgtgtgctgagtgggtgtgtcttttttaaaaaaagtctctggactgtagttttggttagagtttaggaggaggtgaaatgaatgtgggttttcagcctgctgttttaacctggcactgctgttgaaaagaatcttgttgtttggactctagggtacgatcaagctgccacatccttcctggacatgctgagcctggggagatttttcactcgctcccctgtgcagtgtctccttccgtgcccctccttgctgtaccaggaggtgcacttgttatgtttctgtaacgccctttgtaccttgatatggtttggctctgtgtccccacccaaatctcatcttgtagctcccagaattcccacatgttgtgggagggacccggtgggaaataactgaatcatgggggtgggtctttcccatgctgttctcgtgatagtgaataagtctcacgagatctgatggttttaaaaatgggagtttccctgcagaagctctcttctcttgtctgctgccatgtgagacgtgcctttcattttccactatgattgtgagacctccccagccatgtggagctataagtctaataagcctctttctttagtaaattgcccagtctcgggtacatctttatcagtgaaaatggactaatgcatacctattttgttctgttaaagtcctactcatctttcattttcaaatatagattccccagaggagtccttccctggacccctgaccctggcccagatgaacttgagcctctgttggtgtccttcagcagcttgttctgtcacagttatgcttaatcatttgtgcagctccttgtataataccggcctctttttgcctaactttgaagctccaggaaggcaaggactgtgtctttcctgtccattcttagaaacatactttcttgaccatagtagcactcattaaatacctgtccaataaatgcgtgaattcatggacatatgtcttcaactccttgaatttaatttttttttttttttttttttttggaggcaatcttgccctgtcacccaggctggagtgcagtggcatgatctcagcttggccccctgcaacctctgcctcctgggttcaagagattctcctgcctcagcctctcaagtagctgggattacaggcatgcaccaccaggcccagctaatgttttttgtatttttagtagagctggggtttcaccatgttcgccaggctggtcttgaactcctgaactcaagcaatccacccacctcggcctcccaaagtgctggatttataggcgtgagccaccatgcctggcctgaatttaaaatttttgagttcatatatagattaaatggacatgcacacttatttagaggtatgaatactaagactcaaaaggtatacacattaatcattctaatatatttgtaattaaaaattaactaattcattaaacatttattgtctttgcacaaagctattatgtgctgttgacctgattccagagtttaatagtttgttcatattttccaaaatacaattaccttaccttcttccctcactttaatttcttcccataagaattcagactattattttggtagggtatgtgagcattatcatcttattcagtattttgtgcataattaaggagtgctttaagagcagatactgaatattacttttgggcctctcatgaggcagggtgtggggttaggcactttataaatagacattagttgcattgaatattatgtgttcttaaagctggtgagatactttcattaatgttttctcttatttcagttcaatggaagagacacaggaggtttcttaactatattttgtaatgagtgagaatctacacgtttaatttggagggtgtgagaacaccattttcttagtttgcaaaggctactgtcacaaattcccatggactggatgacttagaatgacagaaatttgttctctcatgcttctggagactagtgtgtgaaatcagggtgtcggcaggaccacactcccctgaaggctctgggtggaagcagagggcggccctggcttctggggtcgcctgtgtcctgggctttgcttggtctgtggccacctccctcggttccctgcctccaggttcacatggccttctccacatctgttcaaatttctctctgcttacaagacaaccgtcatttgactggccctgtgtgaatcccatccaactttgtcttaactcaattgcagttacaaagaccctattttcaaataaggttgcatgatagcttctgggtgagtatgaatttgcagggagacactcttcaacccaatctgatcgcatttcatgtatgtacagaaatcttagaaataacacagtggcactctctactgacttcctctgcttgcacgaaggtaatgttcagagaaatggtatggatgcatgggatgaggatccaactgtcttagcagttgcttcatttatttaaaaaaaaaaagagaaatcttctctcaagtttttagaagttctagcaagcagtattctttgtgcaggatccaaaaagagacacacacacacacacacacacacacacacacacttacttgctttttttctctgttatcactgttgatcatcactgtttctcagcaggcagacttttttctagtttctttcattacggtaaaaggaatatgtgtttgaattcagcagtgagtcatctgagatgcgtgttgttatggaaaattgccatagcgttcagctgttacgagacagaagtcaaagctaagcacatttaatggccggagatgagcggtatttccaagaagttctttttattatttttacactttagatgaaatgggtatttggatgggatgagtcccattatgctgcggttgctcacgttggggggatgtgttcacacgtctgtgtggttgtcggtgtctgtgcatgcaatgtgattgagctcctgggtaggtgttcctttctgtcttgaatacaaactggaacagtatgagaacaagctcatgattattatttctactgttatttatctttgatttaagagatcactgtgaatagctttggatgccatactttactgggaattctgacttaccttatttggaaaatacagatcatttccaaaatgtacattcagttgaaggataaatagttgatgaaataggtttaaaaaaactcaaaggacattaaaagcctcattttattgaaaaataaataatgacttttttttcttgaagaccaaccctgttgtttagaggcctaaaagatttgccaaaactatccatatactatccatgtctataacaagtctgtagaggtgactgcactgtatatcaccgtggctctcagtggattttaatttagagcagatgtctctgcatcacacagctgggtgagtctcagcttttggaacacaaagaaatcttccttttaaaaatcaacttaagatatgtttagaaagtagataaaggccaggtgcggtggcttatgcctgtaatcgcagcactttgggaggccgaggtgggtgaatcacctgaggtcaggagtttgagaccagcctggccaacatggcgaaaccctttctctattaaaaatacaaaaattagctgggcgtggtggtgggcacctgtgatcccagctactcgggaggctgaggcagaagaatcacttgaacccaagaggtggagattgcagtgagccgagatcgtgccactgcactccagcctgggcgacagagcgagactctgtctcaaaaaaaaaaaaattagataaaacctttctttgacatagtcactttgaccaattttgcagcctctggaaaccatcatttgattaacttatgacatatcccaatgtccactcaagcaaaacgccccagtttccataaaagctttttatttttgtcttttgcgaaggactactaggaagggtttctgtcggtttgtttctgtcatcaaacaatgaagtttattacaggacagactcagtcttttggtcaataatgtctttgttgcctcagttttccagttcactgagtgtatactaagagaccactaaaggattttttggggcttggtaagttttaaaactagggctagaggagactagaaaataaaagcctatcagtaattgtaacatgtcacgtgtctgacatttacgagcctccatattactttttcgttcccagcaattcttataaatcgtattccatatctgagatcctacgtgtttgcaaatattaaattgtacaagtttcactgacaactcatttgtccaccaaaaagatctataaataagaaacagcaattcccaattttctagttaatggaaataaaatattgtttccttagaggaatacagaaatatagctgggagaagacagaagctctctagcttactttgttcatgaccacagcttgtcacagcaaggaagggacatatctgaaatgtcactaacatctatgatcctttttttatcctttaaagaagggaaattgttggaacttttttgtgttctttaaaaaaatattgaaaatctcagtgtgtttgaaattctaaatgagctactcagagatttgccttagagtgcagggaattatgcataagacaactgcacttctttgggaggctgaggctggcagatctacttgaggtcaggagttctagaccagcctggccaacatggtgaaaccacatctctactaaaaatgcaaaaattagccagaagtcacttgaacccgagaggcggaggttgcagtgagctgagatcttgctactgcacttcagcctgggcaacagagtgagactccatctcaaacaaacaaacagaaagacaactgcacttgagtccaaagccttggcatcctccttgtagcctctctccgcttcacacctctgtgttggggatccccacatctgccccaggtttggtaatttactgaaaggactcacaggattcagaagtcattacactcatggttataggttattacagtgaaaggatagaaagcagaatcagcaatggggtgaagtccagaaaaccagacagaagcttccagagccccctcctggaggcgtcacacagcacccagctgtgacaagaggtgccaggtactcttctaccagggcagttccttagacactcagtgctcagggtttttactggggactggtcacataggaaccctctgcctggcacagaccagaattcccaactcttagaaggaaaccataaaccagattgtttgtacacacagtttagacacagcaaaccactcttatatttaggaaaagttttagattggtataagctattttttatcagccgcatttccagattgcagccacagacccccccttgcaggcgagccccctctgtgaggaccacagcctaggcctcccaggtgaacccttctctgcacacttccattccacccatcaggaaattttgttggctctcccttcaaactctgtcctgaactcactcttctgtgtagcctttgccactgcccaagtccaggccaccatctctgtcccatggactgtcccatcacgccagagcttgtttcctggcttctagtcattgcgtcccccgactgcagccagagggcttctgttgaaactgaagtcagatggagccccacttttgctcctgcctccctgtggcatgtcatctcatcagggcgggatgcctgggtccagtcgcctgatgctggaggcttcacgtacctgccgtgccccctccagctccccactatcccactgacacctgcttactcctgcctaaggcctttgtataatgcctggtctgcctggaaggtcacccccagattcctgcatggccccttccctcacttcctacgggtgtctgcttaaaattagaaaaccctggactgggcgtggtggctcatgcctgtaatcccagcagtttgggaggccgaggtgggtggatcacctgaggtcaggagttcgagaccagcctggccaacatggtgaaaccccatctctactaaaaatacaaaaattatctgggcatggtggtgcttgcctataatcccagctactagggtggctgaggcaggagaatcgcttgaacccgggaggcggaggttgcagtgagctgagatcatgctattgcactccagcctgggtgacagagcaagactctgtctcaaagaaaaaaaaaaaggaaagaaaaccgcactctgttccactatctccccttctgcgcactctccctgctatcctggttcagcactgatctcagcactgattcccccgactattatatagcactttgccttttattttttaaatttaatttaaatagttttttgcatttggcctccttcccctagctagaatgcaggctctacgagagccaagtttgtatttccatgactgctttatccccagtgccttccgcagtacccaggacatcatcagttctcagtaaatgttcttgaatggggattcatggggatataagtccaaaaattaacttagaaggatcaaaacataggagaggtcatcactataacttaaattaagcaagcctcctgtgagtagttctgaataatagagatgactagcctaagaggggaatggctccatttatgggatggtgagtttacaactaaggatggcacttttgtaatcaactaaaaataccccagctcagctctttgctaagaagaggaaagagttgagagcactgagaagagtatttggcctcccaattaatttcaattcctcattgaaattaagaagacatctcaggggccaggcgcggtggctcatgcctgtaacctcagcactttgagaggccaggcgggaggattgcatgaactcaggatttctagaccagcctgggcaacatggtgaaaccccatctctacacaatatacaaaaattagtcgggcgtggtggcatgcgcatgtaatcccagctacatgggaggctgaagcaggagaatcacttgaacccgggaggcggaggttgcagtgagctgagattgtgccactgcactccagtctgggagatagagcgagacttcatctcagagaaggaaggaagggagggaggaagagagggaggcaggggagggagggaaggagggagggagggaaggagggagggagggagatctcagcattaaaaaagaaatcaaaacataaaattaaaatctcagcattaaaaaaacaaaacaaaaacaaatcatgttccacgaaatcctgttgctcacaaacctgaaatgtcaaggtttgctgcttgttgaaagtgatcacggactaggcttaatgtctacacatgttttatgtaagtttttttttttttttttttcctcttttttaaaatgtccgtcttttcagattgtttgatccaggcactaacctgctactgtatactgttttctaactaaacaaatagagaataaagatataaggaacttgaggaataagcccaagagagcactgtggtctggggatacggttggcatccagggtttctgcttttttataggcagctaattcttttctgctgaattgatcgctgtttcatgtcatgcttctcaggagtgtatgtagctgacgggtgaggtgcggctgggcagtgactccctagtgcttcctgcttatttccgttttatttgaagccaaggaggagtttgtttttgatgtgagtcatatgcccaggacactaattccaatccattctcttatcacctccctgaccagttcctaatcagaatctgtacctcatggaggttacagggatccaaggtcatgataactgaggcttgtactgcatctggactcagaacagagcaaatgtgtgcctggtctaagtacttccgtaaaatacccagtgtcttggtgtccttctgcagcacagtctctgtcgtctttgacataagtatcgagattatacacacatcactgataagggataaaaggcaccctggaaatccgtaaataaaggactagcagtcacggcagtgcactgcattgagtctggtttggttgggtctgaaactgtacctgaaatggtttctttaagtatcttgctttctctatttctcgatgtttaataaaggaagggacacggacatgtagagaaggctaaaataagaaatgctgtgtgaggccatttttccccacacaaaccaagaaagaaataaagaccttccctgcatggacaccctctctactaagagtgttcatgctgctcatagcactgaagattccacatccagtgctttttttcagtgttttcttagctttcaatgatgtacctgtcagtgtgattatagatttaacccttaggagggaatctctcctacattttagcatcggagacctagattaaaggctgaggagagaagattaaatgtggccaagagagagaagcttttctttctcattccgtctggtacagccaaaggggtaaggaagacgcgggcttctcttacgatagattgtgaggctgcagtttctatggtgactggtttctttttcccttattcagcagctaaatgcagcaacactcaaacacttgtagctgagtttggccttcaggtgggacacttacattctccaggcatttgccttaagcccatatatagagacagagcttaattttttccccaagtcatttagcagttaatgtttgtgggatacatgatggatatctccttctcatcatgttatccccaaatggctttgaaatagaggctgttggccgggcacggtggctcacacctgtaatcccagcactttgggaaaccaaggcgggtggatcacctgaggtcaggagttcgagaccagcctggctaacatggtgaaaccctgtctctactaaaaatacaaaaatttcctgggcattagtggcacgtgcctgtagtccacctactcgggaggttgaggcaggagaatcacttgaacccgggaggtggagtttgaagtaagctgagatcgcgccattgtactccagcctgggcgacgagggagaaactctgtctcaaaaaagaaaagaaaagaaaagaaaagaaatagaggctgttttgatggtaggtgattttgttagcagactggtgcatgtccctctgtgatctcggtgccattgattgaacttgggaggtttctaccccatggctggagccgggtctgttctctcaggcatccccagtgtctgggcctgaaagcacggttctgcagagtgcgtgctcccctacctcctgttgccattcccgtttctttacagacttgaagaggtttgttaaacagaatctctttgggtggaaaaccccagagaagtccagttcgttgaatacccgttcctggcaacatacagaactgcgaggtggggttcatctgtgggatcctttgcctgttctgggtacttgaactgaagcacatgaattccatggcaaaaaaggaccagcggggccatctagtttttatgagtattggagaaaatcttataagagacacactaaagagggcaacattggtcaaacaataaatgtaactataaaaatcgcaaaatccagatctatacagagttcgccatcgcagctgcttgatcactggggcctgagctccgctgtctgcagtccgttagatagcaacttgcttttaatcctaaacgttaagaatttaagaatttagtcaactttcagttatctgctccgggagttctcactcccaaatggcttctgcttaccgcggataattctggctcttgccagttcccggggaacttgcagggagggtgagatcatattagcatgaacttagcgtaattggtgtatgggatttggaggtgtgcaaaggggatacatctcttgtttataaaactagacacatttcaaagtgatcattgtgcctgattttttattttttgggccattttctattccattctctattaataaaaataattaagaaaagattataattcttttatctacagaagatcttattgtggatttaagccacggtaaaattgtttggaggtggctcccccatcccccctccaaaaaacattaaaaaaccaccaatccttttgcaagttaggccacccgtttaagccccgtagtgcctttcatgaacagacacttgctccagggagaaacctgatgtaaagagaagtttgagcttctctcttttaactttaggacttcagaggtttgagagctaatggaaaatgaggaccccatgtaataaggggagcccagtggtgtggccatgccaccgggccttgcccttcagcgctgtcacccctgcccccagggagggcacactgaggaggctggcctactttgctgggtgtcaataaaaggtgtggggactgttcattcctgagctttctctcttccgtccttccgccagccaccctactttgaatctgcctgtctcaatgacataaagtcaaggataagataaaatctgcctccagttttgtcgccagtgccatttataaccagaaaggccagcacgaacatgtcagataaacctttacatgaatatatgatgtcctgcacttaacaacttgatgaaaggaaaggctcagtttaggagagtggaaacctgctttaaagctccttaatatttaacaagatcttgcacttgtggtgacctgcaaagtctctagatcacaacaggatttattcttttccctgccggcatctggattctcctaaaagtaaatccatccagacatgcctgcatacgtaacccccacccggcaaagggatcagaacatttggtcatttcgcctgtgagtctgtactgattcatgcactccctgatcctcagtcattgctgagcatccgaagattctgagagactgcaggtctataaacaatgggacagggagccaaggcatggccagagtgttacaaaccctggctttctgtgtgataagccactcaccttgaggacgtttttggaatatgcattaacctttcagacctttcgggatagcataaaaaggtacgaaggaaaaacataattgaagccatagatgaatcataggaactcaaaaaccattcttcattggaaagtgttgcagtgaattggtgagcgtttctagtgattcgcacccacgggctgcagaccttgtgctgggtactgtgcatatactatctcacatccccacagtaacctgactcgagaggcacaggagtcttactggttaagttcaggaattgccaggctcagagaagttaatttctagtcatacctcatacagagagaccatgggtgagccaggatgcacagacgtacctcaaacccaaggccacacttttttttttttaatgtttctttgttaaactggggtatttaaagactgcgcaaactcagtattattataacaaagaaccagaaaatgaattctgagagtattcagtgttgcctattcagtatggtatttgaactggagtatgttgctcaactccttattactcagttgcttttgacgagggctctcctgggattttggccaggatgatttttttattgtactaagtgacaactgcccctgccccttgccaaataactgtctgcactggggaatgtggtagatgccgcctgtgtagaattagaaccagtggtgtaagccggaagagtggccccatttttcttgtcagtgattggcttagggagagatttgtgaccaatttgggtcagtaataaatgaggacatctgctggtagtttctggaataggtttccttgctttgaagaagcagcatagggaagagggggccttgctctgcctgagaggcctggagtttctgcagccatcttgagcccacaagggaggagctggactggggaaagctgtcatatttagggtgtggaaggaggaggatgaaaagaaccgaggccatttctgacattgctcatggctctgttcaccaggcttttctattcacttgccttttctctggacccctttgctgtgtgagataatggatttccttatggtttataccaggtcgagtagggttttctgtctggtctttgtgtgagaaggccctttaatagataaaggcttccttggggaccagtaccatttcaggtgactggtctgcttgtctgtaggttggaaatgattgcttactccttgcaaacagagaacccattgctgccatagtggtagtaggcagtgggttaaggagtacttgagttattgttattgtcctgtgcatgcaaagcacctcttgtaccaccatattgtggtcaccattgtttatggttattgctgtcattcataacagcatctttgaatcttatacactagacattcaaagtggaggcagtgggagggtaacagcagcaccaggtctgcagtgtagactggcagcaccgggtctgcagtgtagactggcacaaatgtaagtgtgaatttccagttcttgctgagacagcatcagagtgagtcaaaattaacagggttggttggcactgctgatcacaccaaggggctgaagggtgggtactagagtgagttaatgctggagacagaggcagagagaatccactgatgctgaggaagctcatcagaagtgtagggggaggagaccacaaggtcaggtgtctcatcagcgatacctgacttctctcttaaccgaatctgaatcaatggtcctcaactcaggggccaggggcatgtgcccttcagtggacatgtggcaaagccaggagacatttcagttgtcccaggtgggggatgcagtcagcatctagtggatagaccccagagatgcagttgcaacatcctacagtggcagaacagccccccaacaaagattctggcccccaaaggccaatagtgttgaggctgaccatccctgtttctcacctggaagtggttgatggagggagccgagggcagctggggtgtgaggaaggctctggagactgaagctgttattagatccagtccaggctgcttggcagtgggcactttccagtggggaggcttcccacttgtggcagagcacgtagaggggtttgcaagctctctgtgtttactggcctccacgttggtgtctgggaagggcaaaacagaagctcagactgctgggtggagaagttttgcgccttcccagctcttgcttctttctgtgaagcatgctggcgtcatgtttccatgacagcagttgagttaatgcatttaggggccccctcagcgtccaccacatcctgcctgttgtaaattgtgtggttcaggttgtgatctatgatactacggtcctaaatttctcattactattttttaacttgattgaatgcacagctactagacaaaatcgctctttacctctgtaagtaaaaaatagaaatgcttattagtgttcagcaatagattttaaaattacatttttgttacaaatacttcactggctaaattgaaatcagtgtgatcaaattgaaatgtcataatactattgatttaataaatgctggcctcctaatatctgtttttcaatgaaactagtattacgggagtaattttctaatgaacatctgagcactaggtcattggtaaaacaaaagaagaatgatatcataaatggttctggatggttttttcagcgggacctggcatgctgatacgaatagaggaattaaagcgtagctcattatatattaatttgaatgtaatactaactaaaaccttccattgacttcactgaagcctagtcttagaaattatgcagattaatggaggccttgaaaagaagcacatgcaatatttgagttccctttggaccaaaaaactggcatgttggaactgaaaaaattatatactgtgcagtatttttgtgtaagtacaatacactaaaagattttgttgcttaaaaaaactgggcagggtgaatcctatatctgttttttgtctattttattttatatccaaataagccgaaaggaagaagcaaaggaccgaaggttgacactgagattgctgctgcagagggagaatttcctgcagcttttgattgtggaactcaggttaagaatgtggttcctggagccaggcacggtggctcacgcctgtaatcccagcactttgggatgctgaggcggttggattgcttgaacccaggagtttgagaccagcctgagcaacatggcaaaaccccatctctacaaaaaatacaaaaaattagccaggtatggtggtgcacacctgtcgtcccagctacccgggaggctgaggtggaagtattgctggagcctgggaggcggaggttgcagcaagccttgattgcatcattgcacttcagcccgggtggcagagaccctacctcaatgaaaaaagaatttggtttctgcataaggatgatttcactgccttttttgtttttacatgaaaatcctcaccaagtacattttaattttgttgtattaattaatgagaacttgttctcccctgtgcctcatctttcacaattttatatcatgtgagatgtatttatctaataaagtggcgatgggaagaggcattagctattttcggagtctgtgatagccacatagtgacattttaaaagcataagcttcggttcttcaagcccctcaagtaaatgtggagatgagtcaagttcaggcaggcccagcagacatgaatgttctttcttttctgtcttctctttctcctgtctctctgttagtaatactctccattgctgtctgtagattaatactcacagccacgtgtatactgtattttataaagaactttgctgttcaccctgaagctttggcacctgccagagacatgagttgctgctgactcatgatgactatatccaggcaggtgtgtttctcccgcagcgatggttcactcctcctgaatcaggtgctgtccctttccaggcacagcaaccactggcaaggcagggacttcatcagaggcagatgttgaaagtggtgggtgaccgtgggtagtgagtgcacccagggcaggctctgacgttgtgggatcctcctgacccctgttttaagtgaaaaaagtgagacataagccaaaactataaagtcaggacaccaagatattgcagtttgtccatactcctttttccagcgtgatactctacttcctgtttctcactgtacagttttttcttttcttttcttttctttcccctcccctcccctccccttccctttccaacggagtctcgctctgtcacccaggctggagtgcagtggcgtgatctctgctcactgtaacttctgcctccggagttcaagccattcccctgcctcagcctccccagtagctgggattacaggcgcccaccgccacgcccagctaatttttatatttttagtagagatggggtttcataatgtaggccaggctgctctcaaactcctgacctcagtgattttctaagtaaatttccagcttctcagggtcagcaatcacatcaactactttcctgtgcgtccatcataggatggtgcctgtcacatggtgtttaaaataccagtcccaggctggggttggtgtggactttgcagccagccacgtgtactagattaaccacgttggtcagagtaacctgtcttggttaacatcgataacatcgcatggaagtcggtatcgatggaggataattgatgaagcactgtggacattttgctgcacatatttcctaaatcttcattgcttactgtataaacacacaaaagtagtcatggtatttgttaattgttgatgaaggttgtgactggctgtaggtaaacattttggaagtaatttttaggactggaatgcactcacatgcttttttcttaagccactgaaaagtgcgaggaattaacagcaaaacttggaggttttaagtaaatgatcagtgttagtagctatcactttttaacttagcaatagctctctttgaaagaaaattctagggggctttaagtaggttgtaggttgtagtggtattgtttgcttgtactaattattgattttttaaaaatcctttttggtctttgttccgtggtctgttatataacctggtggctagagggtgggctcagactgaatcaggctgcttgggtttgaagcctggcttctcttggtagctgtgtgcccttgcttagataacttcatctctctaaatcttaatttcctcccacaagagggattccaccccacagtctgtgtcagcagaaaatgacaatgcagggagcatgcctgccagtatttacaacatgttagctgtttctgtccacttgatattacagcctgagcatctcttatccaaaatgcctgggaccagacgtgtctctgggttcagattttggaatatttgcagtacatttgtctgttgagcatctgaaaacctgaaatcgaaaaggctccaatgagcatctcatgtgagcatcttgttggccctcaaaaagtttcaggtttggggcttgggattttcagagttgggattccagtttgtatacacagaacctagttagtctcagcacagagttactacatcttagtaggagagtgagaactgctcaggctctggagggaataaagctgatgaaaccagggtgcagaaaggaagttgatgtagatagaaccacttttaccacgtcagtctgctgaaaataaggttccctgaagagacattgccacagtagcctgtgaagacagtcttccaataaaatgaatggcattttacttttgatcaatataaaactactttagggcaaaaataaaaatgggtagtgatgaatgtagatgggaatgacattgctggcatttattaaaggagagcagtttttctgtacgcaatttgaccagactccagtactctgaagtaaacagtatttctttaatgtgacaggcatatttgtaaatctactaaggacttagtaatatatcctgataacgggaataacatcattcttgatccaataattgcaaagtgtgaatgattctctagagctttgcaaaggccaagaatgtctctttcaaatgacagtgaattttccattatctcttagtacataatcggtttggcgaattgtcttcaggacccaggaactctctctgtccttgacattgaggatgatgagttgggtgtttgtgtaaatgaatgcatgccctccgactgcattaacagcccaaagtaagtggtctggggtgattagatttgtttttcaatgagaatagctgcatcttttctcatatactaatatggatggacatttacaccacagaactcagcagttctgtctgttggcttatttggaaattcgctggtgttgaattcttcaattatcataaaaacttgttattccttaggagtgtcaagtgacttcttttgccttttagatcatatttcagtgcttccatccagtatccagagcccagtctccatgcataaatccactgtgccaccttcccagaatctttttttttagacggagtcttgctctgttgccaggcttgagtgcagtggctcgatctctgctcactgcaacctccacctcccgggttcaagcgattcttctgcctcagcctcctgagtagctaggactacaggtgtgcaccaccatgcccagctaatttttgtatttttttttctttagtagagatggggtttcaccatgttggccaggttggtctcgatctcttgacctcatgatccgcctgtctcagcctcccaaagtgctgggattacagatgtgagccaccgcgcctggcccccagaatcttttatcatcatgagtcacatgattttcgtcttccaaattaagcttcactcctataaatcctttgactactgtgatcgtagtgatacttggtttttatatgctagaagtaaaaaaatttgttttgaagttccttctcagtctggatcttccatagctgttcttgcctctcttttccttctccctttgacaaatggagggtgttctgtgtattccatgcaatagctgttagtctcctgtgcggtgcctcagtggtttctgatcagtgcttattggatgaatgatagaatataggattggaatggatgtcaagacatcattgggtttttgtcatcccttcagtttaattcgataaatatttatggaagcctttcttgggtgagccacgtagcataaatgagggagtttggcatttactggaaagttctgcacatacagcatggatatctttcatgttttttaaagttctccaatggccagaagtttcagtggcaaaccccgtcagaaaatattgtcacgctcttgcagtaaaacgtttctgaaatcgtcattcatcaataatataaacattagagtagcaggtttagccaaactcttaattgttttgtctttattcttgagtcttctcaatttccgttacgttgacttagctttcaaactggtgggatttctatatggtcatagagggattttttttttttttttttggttgttgattagaaagtgattttcagaaagtgaaagttagggctggaagatacagcaatgcattttatagtttccaaatttatttctgaaatacggagttgaagttcagtaggataagatatgtggctatttgaggccagactacaaatacctgtgtttggatgctgcaacctctcagaatgtctggcttctcttttcagtatatgaaacaagagtgtttaaggggttttgtgtagtttggaaggaaaaacagatgcatttctgtgagtaagaagtgtcttgactataacttacgaactgtttttacccacaacacttctaacatcacatgtgtgggttttttccacaccaaccagttcttcaactctctggacagcaagtgaatatcctgcagtttaattcatttctgacactgtctgaaagcagtgcagaccccacaagtgaagggctcggtaccataagatgcctccactttgatgccagttacaagtcctgggcttcctgtacttgatggctataaattagggttcctgaaaccccctccttggatttgatagttttccagaaggcctcacagagcagtttccttactattacctgtttattgtaaagggtaccatacaggatgcaaatgaacagccaaatggaagaggtgcccggggtgagggctggaagggggtcccaggcacaggggcttctggccctgtggagttggggtgcccccacctcctggcacatggaagtgttcatcaacttgaaaaaccccaactctgtcatttagggtgttcatgggagtttcattatgtaggcacgattgattaaatctttggccattggtaatgagctccatatccagctcttctcccctccctagtgggtgtggggtggaaaagaacttacaaccctctctaattatgccttgggctttctggacacgagcccccaccctgaagctgtttagggtcccatcaagaatggacccattagaacaaaagagctcctatcacctgggaaatcccacaggatttaggagtcctataccagggacaaagaccaatatacatttaccacacagctgaaacctgggagaaataatttaagttgtaggagatctgagccaagactgacagaggggaaactagtttctaaaatttttggaataatgctcactgagcattattcttaaactgtttaagaatattttaatgtcatgctatttttattttcatcccgcatccaccatgcttggttttgatgttttatgttcattgttatagatgagcaaagatgggaagtttaatgatggacgttcgagcacaggacactctgggagaaaaggaagagattgtgtgttgtctgcaggaagtggaagtgatcccctcttaacctagagatgtaattagatgcagaggacgctgaagtcattacccataagcatttccaatacagtccgcagccctgagtggatagggttatctcagggacacattgctgtctgctgtatttccaagcagcggcagccactgcctggtgtctgctagatgactgtgaacacaggaagtcctcagagagggcagggcttctggggacacagagtttccacacagcacggggagctatgattgacagagcttcccagaggacttggagtatgagataaaagatgggtgtggatttggctaaagactccaagtcagcggtcaaggtcaggttgagggcctgcgatgtagaaagggcttagggttatgggtaaaccctgcttagaaagctgactctactcagagagcaaaggttggagcaagagttttgtggaacagagagaagcacagaatctggaatggagggaatgaagagggcgggtagaccagaagccccgtggctgtcaggatgcccctagagcagagactctcaggaaagccggggtgatagaggcagccagggagaagacccatgcttgtccccgtgcaccagacctcaggaatgcctcaccctgtgcctgtggctggtgaggggcaggctgcaggaggaaaggggtcctgcacagagaaggaggctcctgagaaacactgacattcatctgttagccatcacttatagttatgaatgtgccgggagtgactgagggcacctctgagttgtcaaacagcataataatgactgcttagacttgctgagtacattcaggctacgctttattatttcataattctataataattccccttttccaaagatgaaagggtttatacttaaatggggaaggatatttacctgcaaaagccgtgatcgggactcatttcccgctgatgggtactggggacatggttgtctgacaggaacgttcactttttgagatggagtctcaccctgtcacccaggctggagtgcaatggtgtgatctcggctcattgcaacctctgcctcccaggctcaaatgattgtcctgcctctgcctcccgggtagctgggattacaggcttctgccaccacattcagctattttctgtatttttagtagagacagggtttcaccttattggccaggctggtctcgaactcctgacctcgtgatctgcctgcctcagcctcccaaagtgctgggattacaggcaggagccactgcgtccagcccacttttaatctttttttttttttaatgtttaattttttttattggtacataatagatgtacatactttggggtacatgtgattaatacattcatataatttgtaaagatcaaatcagtataattgagatacatatcaccttaaatatttgtcttttctttgtgctagaaacattcaaattaactttgaatctttgaattcggatgctagcaagtcaatgttggtttagttgtgatggcgcctcacctgtggcttctggccctgcctggacatgatggctggtgtgtgttaatccacattcgctctctgtacagtagcctttgattccttctgtttcctgatttgctttcccccagccacctttaaaaataaatgttttgaaatcaaaaccacaaggagataccgtctcacaccagtaagaatggctgttattaaaaagtcaaacaaataacagatgctggtgaggctgtggagaacagggaacacttacacactgctggtgggaatgtaaattagttcactcactgtgaaagcagttttgagatttcttgacttaaaacagctaccattcaacccagcaatctcactggtggctgtatacccaaagggaaacacatcattctatcaaaaagacacaagcactcacacattcattgcagcattattcacaatagcaaaggcatggaatcaacctaagtgcccatcagtgatcgactggataaagaaaatgtggtacatatataccatggaatattgcatagccataaaaaagaatgcaagtatgttctttgcagcaacatggatggagctgaaggccgctattgttagcaaactaatgcaggatcagaaagccaaatacctcatgttctcgcttagaagtgcgagctagaccttgagcacacacggatgtaaacatgggaccagtagacactggagactactagaggggaggggggaaatgagtcatgggtcgaaaagttacctattgggtactatgttcactacctgagtatagtatgcccatgtaacaaacctgtgtatgtacccctgtatctaaaataaaacctaaaaataaataaattaaaggctttgtttgcaacataaacaatgcacatcatcacctgcacctaatttccttgtacttttccttctgcatataatttttataaagtgtggattgtaagttcttaaggaatttgtaaatatttagagtggccagttcctttgattgggttttgtcgtatttgaccgcatcctgtcttgttctgattaatgtcctctttggacatggccccagcattcatcatgcatcccccaaaacagagacctttgccgactgccctggggacatgaaaaatgaaagggtccatgcagttctataggcgtttacattctgttaaccttggcaactcggtgcactggtggagagttttataagcagttcttctagtctgatctcctcttggacgctgacggtactgaccagcttttgggggctttggggaaacaggcactgcccgactgggctctgtgcagtcctcagagttggatatagagtggcgtcgttggagtaattaaaaacccactttagatttgcaggtaaaagaaagtaacaggtccccagatatttttgtacttcacacccaattgatgtatttggaaatcgcaggatttatttgcaggtattatttcctcagggacagactgcaaatacattcatttatccactgctgtttatccagactgtgagttatgaggtgacctccatctccgcaagataaattctggtatccagagtccagccaacctcctctattgctgtgtagctgaagtggatattgaaatttgttatcttaggaggcgggaaagccccatctctctcacataaggttgctgtaagcaggttataaaactgccagacccctattaggaatggggtgttgctcacctttattgagtaggagacaggttctaatcgtctgtggggcaggtttggattcttacctgcaggcatctctaagatcatgggatcttgagtacccctacccttactcgtgccggtgagctgtgtgccagcttacttctagtaactggtaagctgtgtgctcttagacacgggaggtggtggcagaccttgggtacaaggtgctgactgaagccctgagatgtgactccagtagcaagagacctggtgttttctgaagacaccctgctgtgttaggatgacagattgcctcccttactctgctgtgcttcagttaatagcaccaaggacgagcaaagcagtgtcatgtgaacttttgcttagtgtaaatttaagcatggccaggaagccttgttgcctctcccttggaaaagcaatttagcctgcagaaaataattaaatccgtggtatctggcaataattagaaattcgaaacagggaaggttaattgtctccataagattttggttgcccaataaaatgctccaggagcgcatccggacagtggctgaggtcatttacaataccgtggctttcaatattttcatctttctccctgcaggatcacgcagatttgcgaagccatttcttcacagttgggatgaagcttgagacagtgaatatgtgcgagcccttttacatctctcctgcgtcggtgactaaggtgggttttcctccctcgctcttcgacccagcccctagagtggatcaaattaagcctttcaactcaaagacgaccagatgacatatgttcgtgcaaggctatcagcaatgccaggcgaagctaaggaagattgccgcccttccagtccagcgctgctttaagctgtttttattactggtggcacagagtgactctaatcagatgccccctcttatcatggatagggtgaattttccttgtcttctgatagttgtccactgacgagttgcaggttgtaatcattacaagagtaatttgttcttcctgcatgggtagtagtaaatatgatctgtttatacttggaaaatacatgaaaatggtgcaaagcaaattctcatctcccttttctcagcatttctgtgttttttctcatctgcccttgttgactaaagaaaaactcatgcttctaagatctacagattcacaataaaattaccttttaacataaagacatttttataatgatctgttagtccttgaagattgtaatatcccagcaggtcatggtggctcatatctataatcccagcactttgggaggccaaggtggaaggatcccttgagcccaggagttcaaaaccagcctgggtaacatagggagaccctgtctctacaaacaataaaaaaattttaaaaaccagtataatatccattccccattaaagaagttttaatgacataacctctggtaaaatcaaaattgcttgtttctaccttaagtattctcttacaaatggtgcgggaaacttaacattcttggccgatgtgtgttttggtgaatggtcttttgtgtacttcactaggagaatttaattaaagatttaaatctgttttaatttctttttcttaaagatacgggattttctttaaggaaaatcacttttcatgcagtgattagtgtttgttacttgagtcatgagtttttaaaaatttatgatttggtaacacttgaggaatttagtagtgtgataatgtattacagaatatggaaattggttataaaaatgaaatgctttctaaatgttttttctttagtgaacataaattatttttataaccattaaagtagcttatttcaaggataactttcggagctgggcacagtgactcatgcctgtaatcctggcactttgggaggctgaggtgggatgatcacctgaggtcaggagtttgagaccagcctggccaacagggtgaaaccccgtctctactaaaaatacaaaaattagccaggtatggtggtgcatgcttgtaatcccagcttcttgggaggctgaggcaggagaatcgcttgaacctgggaagcagaggttgtagtgagctgagatcttgccactgcactccagcctgggcaacaaagtgagactccatctcaaaacaaacaaacaacaacaaaaacaaaaagaaactttaaatatttaaggttatttaaagaaaaatatattggcttttgctttataatctggaggttgaaagtcatgtattcctgattagcatccgttaaaaaccttttatttgaaatggcctttggagttctttactgtgtatcctgtcagttgtcggatatttttccaaaatggaccagtggtgccctgttgaatcccagccagaattcccctttgttctgttagtgggtgctgcagtcatgccggctgcccatctgtctgcagatgtatcacgctacagagtcgcttcacctggtatttatcaattaaactcaacagacttgatgtgcatagcctgtcagcggtagcgtctctcaccattcttttttttttttttttttttttgagatggagtcttgctccgtcacccaggctagagtgcagtgacatgatctcggctcactacaacctctgcctcccgagttcaagctattctcctgcctcagcctcccgagtagctgggattataggcgcctgccaccacgcctggctaaattttgtgtttttagtggagatggggtttcaccgtcttgaccaggctggtctcgaactcctgaccttgtgatctgcccgcctcagcctcccaaagtgctgggattataggcgtgagccactgcacccggcctctctcacattcttatgcctttaaataattcttatgcctttaaatagttgtaatatgtcatgttagaatgtgtctactaatcaaaattaatttcagcccaaatctctttttctagctgaatagacttccagtgatagttggtttttcacagtaaataattttctctaaatagatcttattgaggggagggagaaagtatttttactgatttctaaactgtgttttcctttttattttgctttttcttaccctttgtagcaaagataaaataagtcatgccgtttcgtatacacccctcctcttattgaccatgttttgtataacacatggattggggtatgtgcatctgtcttttagaacctaggtaggcacctctccaggttcaagactcatcttcatgtaatgaggtatcagaatactcttagcgtagaagatatttataataattaaatgtatttctttaaatatgaggaaagtactttggaatattatgtttgaaaatataacacactgtgctgtcattactcatcacaatgaaaatttcattttttttccaccttgggccttttcttcgtggcataactgttgaagaaatatgtaaacgatgttacaacaaacagacaaggatgcagacagacgtgtagtggatccagtattaaatgatgaacctccagcagtccagccagggtgtgtttttggtgttgagatactggcagatggtgatgatgtcatctttgtaagcgaagtgtgttgtattgattagaggaaaggatactggcattagaagccttgggttctgtttctgtttctgccatctcttagctgtgcagtcttgggcaagtcagttaactgctctgggcgttagttctgagtcctgtgggttatggactggatagagcacaaaacagtgcttcagaccatttaggaacatgagccctgatggatttgatgaaacttactaagcttttcctttggagtgttcccacgtgaacatgcattttaacggttgtggaaattccttctttacagggtaccgcagctccaccaaaatcacatgctctttatatacgtatgtgtgtgtatgtgtatatatgcaagatagactaaataacagtaatttaacagatatttattgagcattcataggctcaattctggacaatgttcccattgtggagcttttattttaatggagggagacagactataaacagaatcaataagtaaataaatctagtatgttacatattaaatgctaaggagaaaaatacaccaaggcagggatgttggggtcctgggactgtgccccccggtagcagtgaggaccccaggaggccttggtgttagtttccctgttggtaggcacttggctttgcaccctgagccagatcgccgtgcatcagttttcaggactgtccagtggagtccaggtgcccagcagagtgaaaatgatagaagtcaaaggattttcataatcctttcaggtggtgggaggatgagattctcaacagggctctcggacatgacctcactgggaaggccccatctgatcctttgttgcttgaagttgactttcacaggcaaaccttcagtaaactatttaccaaaattagcacaggcaagaacagaagtgaatttcctttcctgcttcactttgaactaaattgcttccagaaaaaaaatgaaggggccaggaatcatagctttgtaaaactctcaaggtttcctaagaaagactgggttatgtctgttgaattgggaaagggatctttttttctggcctgttttagatactaagttacttaaatccatcttgcttttcagtgatggtccatctgatttttaccctctgctttgtttatcggcatgtcttgttcttatttcttcattgatgtttcttcttatattcagtggacatttatcccgttcctatgtacaaagcactttctatgcatttggaaatacttgtgttaacaaaaagacatcactctcctctaataacttatgctctatggcattggaagactgatgtgtaatcggtctaggaaggaatgagagttttcaatacagaagttgaagtctgaaattttaggagcgcagagtgagggcggtttattccagccagatcagaagcattgaaatatgagatgtaccttgaaaacgcactgtgttttgatagcttaaacatggcattgggggttgttgtagtccatgaggcttagtgtgaacgatttcctctcgggctggagggtggggtgttctgagggaaaaggtgcaggaggaggctagaaagctccaagccagatcttggagattcttgagtgatctggtgtaaagagtttggtgctggctgtggacactgagaaacggtttcacttttcagttcctgtcttggctgtcatctaagctggggtttgtctgtctgacttcctccattcatttttcttcaagctatagccattggttgacttctctaagtctttgattttgttcattctcactcttccagataacctagttatttatcttttcattaataggaccacagcagtcaattctaactttttatcagctgaattaatttagtaatggacattgaaaatgccagtttgtattcaaatcattttgatgaactatattaattgcctttggaagctctgccactattttatactagcattatatgtaactctaaagaattaacctttggctcccccattttttttcttttaggtttttaacaatcacttttttcaagtgactattgacgacctaagacctgaaccaagtaaactgtcaatgctgtgccatgcagattctttggggattttgccagtacagtggtgccttaaaaatggagtcagcctcactcctcccaaaggtttgtattctgtgaaggtatgcagggtctggagattcaggagggtgtcttactgtcattgaagtaacacctgcattaatctggggaggctggttgtgtaaagggtttagatgtagtagaaatagggcgttcttcatcagcttgacataggtgtcagttacagctccatcccctggcgaggcgagtggccttgggcttctcacttctgtccacaggagtttccccatccgttaccgcattattggcagatgtgctgctattgtgtagacttagagggtgcagcattgctaagtgattgagctcaaagacttgaaagtgtctgagaagtggctttacaaatgtaacacaatgttggtgaagcatttctttagagtgtttatttccagcgagctaagctttctccagagtcaatttgctttcagatatccgacaattagatgctataatactttaaaataattacactgggagccaggatgcattaaaataattttaaattgggattcaagaaccacattgttagtgagtgccagtcttagagtttaccagtgtggtttgttgtcctctataggtcaggtttattcaggaagaaagcagtaagatgagaggtgagactaagagaagaataataaaggtatagtaagaagaagaaaattggaaaaagatgagaaaagtaaacttattggggaggattttaacagacaaacttaaataataaggggttttgtactaacctttccagatctctagggattggattgcttgggacattaaccctattgggagaatcatgcagttcccacaggttgagtcccatcttgcctggtggcctcgccagtctgtttacatcatttaatggtgcctgcctgcttacctttactatgactgtactctgctgggcttttatcttcatttttccccatatttgtccttacggaggagatgcttttgaatatttccatttcagctttcaactctttgggttaaagttgtgcagtcatggagttccgcctaatggtatatggtaaacttacacagaacacagtttaccagtcactgtttttaatgcctaattcattcactcctcaaagtgaactatgaagaatctaagtcacagagagtttatataacttgcacagggtcatttggatcgtaggtctccaggcagagcttgggtcctgggactgtgtcccctggtagcggtgaggactccaggaggccttggtgtttgtttctctgttggtacacactggctttgcaccctgagccacatcactgcttcagttttcaagactgtccagtggagacacctgtgggagtccccaggtgccagcagagttaaaatgagtcgaaggattctcatccctttaatatggccttgggggagtcatattatcaacgacctattggtagtaggtgggaagtccttcgctgctgtggaattagccataggtcctgtagagtttgaacaccctgtgggccatcttcctttgcttcctttggacttttctcatggaagtatgtgtggggaatgggtcctgtgtcattgaaggaaaactttttctagatatgtaaatgctacttggttagactttgcttattcctcaatagtattagaatctattatatttaagaattttgaaaaaatggttggctgtttcctcattgagtgaaaaaaaggaaaagtatttatatcagcattttggctgcttgatcactccattatggcagaggtttcatagttgtcaatgttgtcagaattttaagatacattttctatgaattacataaaaagatcattgacatagcttagaagttcaccaggaaaatggatgtgcctatttggatacttgagttttatgatattaagaaaattgttttacattaatgcaactgaactgttaaacattcaatgaaaggactgtacaaagatataaaattaaatatttttatattttaagctttttatacataatatttagttatgatcatttcttctcttttatccaaatatttgtgatatttggtaaggtaaaattctcttcatgcattcttccaaaccattcctttctcttgttgaaagtgaaattttctttttcagaaactcaaaagaatatttcttcatggatattatatgcaaatacatactacacatcaagtagaatattgagtaatggtggctagtaccttccaataagaaactataactctttttaaaccattaaagcattcaagaagtggtaaatatcattagttcagtgtactagtctgttctcatgctgctcataaagacatacctgagactgggtaatttatataggagaaggggtttaatggacttacagttccacacggctgggttaacctcctaatcatggtggaaggcaatgaggagcaggtcacgtcttacatggatggcagcatgcaaagagagggcttgtgcagggaaactcctgtttttaaaaccatcagatctcgtgagacttattcactgttaggagaacagccaggaaagacctgcccccgtgattcaatcacctcccaccaggttcctcccgtgacatgtgggaattgtgggagttacaattcaagatgagatttgggtgaggacacagccaaaccatatcattcaagaatgtggtaaatatcattagttcaggaatgttttcttgaaatagtagaatttttactcgtaaaccagtaagaaaaagaccagcaacttacaggagtgtggacaaagaataacctcagaagagcacacaatacaagaagctcagtgactcttgggcaaacttatcataataagagaaacacagatgaagagaaatcctattgaagtggtgtctgcttatcagatgagacagaaatcccaaggagaaggaacaggagaacctcagcttggtgagacggtggaggaataaagattcttagacattgccgttgagagtgcaggaaggtgcaagctgtgtggaaggcagtttggtggattttgctaaacttttattttcccactgactcagtaattccacttctggaaatttccccttaagttataatgtagagatcatctgcataaaagtttgttttttttgcagcattatttacaatagcaaaagagtggaaaaattcaagtacttatcagtaggatattggttaaatagactttggagatccttctaatgagatctgtgccattgttgaaaagaatgagggacgtctctatgaactgatgtggaaggctgtccaggatacactgtgagtggtacagtaggtatcgtatgacacttcctatgttagagaagaggcaaaacagtacctatgagtgtttgcttatatttttgtagttacataagaaaataatgagaataattattagtgtttttggggtatgagggacagaggtggggaatgtggcataagggatgaaggtagacatgacgtgtaacaataccatttttatctttttttcttttctatctaaataaatgtgttacctattaaaaggtaacacatattattaaaaatggagggtttttataactgaaagggatcctaaagatgatttcatcaaccttacttattttatatctagagaaattgaggctcagttgtgttaaatgactttgcaaatcctggtgcaggggtgcaggggtgcaggggtgtcgggttaaaaaccccagacttaagataccaaatctaacgctttttctacacaaccgtatccacacttcactgctgttctgtcttgctgatgttttgtaatgttcctccttcttagtaattctagagagtttggggggcctaaagcaacctaattcatgtcagtggaccatggctttacacaattcagatggtcaatatatcaaagcagtcagagaattacaattttagggaataattttacaagggtctgtggttaaaagacagtcatggcttcattcattgactcccttactctcttgtgagagtgcagtatatttatttttgtaattaaactgaatgagcatttagaggaggaggtggtggtggtgattgtggtagtggtgttttacggtttccttttgaggtggttggtttcacatcttgcatctcaacaccaggattaagagtcatattgtagagatgtttcaaagaccattcttcactttatgaaggtatgcaagtagaagcttttttaaaagtaaaaggttattgtgtctaaattaaattcttaggttgacacgtagaatatgtgggatttattgtacatattgccaagtgatttcagatgtttccacatgtgtatgtttcccatgaatgtattgggttgtctaaatttctgttaagaacatggatgctgcctacaattacaatgtgttgcttgacttcaaaaagaggttgggaagcagctgttgaaatgaaagacttccggtggtgtaggagaaatatatgcaaataacacagatattttattgcgttgttttgactctgttcctacttaaaaaaaaaatttgtcctcacaccttagagacaagtgagctagagtggatacgagtttttcagtgtggctttctgtgtagtaaggattttcctggtaagcaaaagttagaatgttggagattttactcaattagtttaaacccaataaacagcaagtcagtttcacaggcactatgaaaagtgatcaacaaataagtagatcacctaagcaaaaatgtgtataggttatcaaccatgactttctattttaaaattatttcattaacctttcttgtgtcacatcaaagattagttgtataattagtggaggaaaagttccacccaggaacttttgtagaaaatgttcagcctttaaatttctgctgtaaaaggtgtgagcaaaggctgaagtaattggcttacgttagcactttgatttgtctctgtttggctgaccatttaatagacacataaactgttaacacaatttaggaagtaaaggtgtattttaattattattgagacacaaagcagggaaccgtaagtcgtattctcttttcctaaagaaaaacctcagacactgactgatgagcttaatccattttgtcactcacgtttcagacataccaaagggggcagaaaataacatagacgctcatggccctaccaccttacttcaacagatgctaacattctgccttgtttgattcgtgtttttcaacaatgaaatatgaaacacgaaagcattatagatataatgaagaccaagtcatccttaagtcctctgtttctcatgccccatacctcatccatcagggagtcctgtccacattttcagagtctcaccacttctcctcacagccacctgtttcaggccgctagtgagtctcacctggttcctgcagcagccccttgtttaactcaggggtctctcaacactgcagtcagatcgatcgtgttagaacataaaccatgggtctctctgctcagactgtccagtgccttccaccccaccctgtgtccaagtcaagactgtggcaacagcctacagcacccagccgtgctgacttccactgccctgtccagcgtcatctcccgactccccactcagtctgtcccagtcactctcatctccctgacgtggcacctgctgttccctctgtgcagacacctgtcacctgactcagtcttgactcaagtgctaactgcttgaagtcgtctttctgggcttccctgttcaatctcagtagcaaaccaccactcccaacatttgcatctccttccctgcagtatatcacagaccttatcatataatacacaaataagtcatatatacgtcccttgtttgtcttgtttttcattcatctcccccactaaaatgaaagatccacagcagcaggggtgtttgtcaatcacccactagtcatcctcagtagctggaatagtgggtggcacttggtaggtatttgttgaggttgaatgaattgaagctctgtccccattctctcccacccctagcccttcacccctcatcctccgcaaggtgagcaccctcctaaagattacatgcttttatgacatgactgcataggcttctttgtttatgccttaccagtatcattgtttttattaccgtcaaattaaaatagaccttatttgactatatacatatataatgcgctatgcatatctttatgtaactttttatttattaacatttttcagatttttttccatgttggggcatgtagattgtttattcattttgcttgctttacgaatatactgtaatatttgaaaattccattttctattggtgaacattgaagggatttccaggtttccctattgcaagtgatccccaaatgtacatccaatgtccccaagtgtaagaggtgctttcaggggatattcctaaatgtggaattgctggaattctgtagatagtaccaaatactctccacgttgtgtcagtttacatttctaacatggtgtttgagcattcccattttgtgtcaccctccctgttttgcggtattcccaggattaagcatggcccctctgaggggagtgaagtggatctcctcgtttcagtgaggtggtcctgatcactaggatggttgagcactgcatcctacccttactggccatctgtggttttcttcttcggcccattttcttttgatcgtagaagtagtttatatattctaacatgaattctttctcagcaatgtgcttcacacatatgataacctagtctggcttgtttctttgctttttaatggttttttttaaaggcatattgaagtagtaaattgtaatgtagtcaaacagccatctttccctgtatgcattgtttatatacctttagaattccttcctactgatgtgttttctttaaaacttgcagttttacttttccatgtttagctctgtaacctacttgacattgatttttgtattggcatgaggaaggaaaactatcttatttttcttgcttgaattgaattgaagtttttcatttccccacttgtctctgcatcgtttgttgaatggtctgctgtttcctctttgatttataatgccaccactgtcatggatccatccctttgtgggtgtgactcttaaccctgttcttttttattctgcctcttcagtctgtttgtatagccctgaacaaattgttattactttataataatatagtcttgatatctattgttgagtcactttttctttatttttgttcaaaatttttggttatttttggcaggccattcttgtacattaattttagcattggtttgtaaggttctataaagagtcccattggatttcggcattgtgttgaatttatagacttagaaaaattgatattttcttatattatctttttatagcttgcaatcttttcttggaatatttcctaggtaccttatccttctgcttgctgtggtgaatgggatttcttttcatttcttattggctgtcagctggtataagagagtaccactaattttgtatatttatgtcatatctagctacctttctaaactgtctcaaaaacagtttgtgtaagatatgacttttgtgatacttgacagtttgggaaaactgtcttataaacctatctggagctgttgatgttgttggtgttttattgagtgtgaatttatttcctttcgtggatataagtttagtcagggtaaccatttgtgagatagttttggtaatgtacatgtattttacagtattgtctgtttcagctgtattttcagatttattgccacatcagttggtcaggtcaagtttatttattgaagtattcagatattctatatcctcactgtatttttatctgttctgtaaatttccaaatggtactttaaaatatcattttgagattgaggatttgttagcttctctttgtttttgtgatggatatgtttgtgcagggtgtgtatgtggggtgtgtgtgtgtatctaatatgtgatgtgtatgtgtggtacgtctgtgtggtatgtgtctgtatgtgtgtgctgtgtggttgcgtgtgtgtgtgtgtggtatgtagtgtgtggtgtgagtgtgtgtgtttgaagttgtgttaaggtgttcagattcaggatcattagactggcggaagcactcttttttcctgataaggcattttgcattaaagttcatttctctgccctccctcaagttggttagtttccttatgtggtttgtgattgttgattatgaactaatttcagtggtggttgttatttatgtggcagttccatgtgccctggattgaagtcatctctatttatttgttactgtctctatccatccactaggaaataaacttcatagggtcaagggtatttttttaatctcttttgttcactgctgcatccccagcaccaaaaacaatgtctggtccatgagggtgtccctgattattcaaggaatgagtggctgaatttgatattaatttctcagtctgtgtcccacggaattggaaagctggaccccacatccgtgtgtgccactggcctggggaagtgcatgatctccttttttcttcttcagaaccccaggtaggtagcccatctctgctgcctctctgatccagtcagcttagtttgtctggttctattttcatagactgggctgctgcctggggccagctgtagatagtagcctcgggtcctcctgctcatctcccttgaaccaggctgttgtctgccctctgtgagctgctcactgctcagctctggctttcagggctctttcaggttttggttttttattttttactttttttttggtgtctggagattttcttctcttttgacttgggctatgtaatttttcaaaattatatttcatctgatatctgtagggagactgtcagatcgtcccgcccggctactggacttggaagcaagtctcatttctagctttctgattcattcttgagcaaaacggtcacttttgattgaaaagagttggtatagtaaaactctctaggtcatttttaatatctgaaaatacttctgattgttgaaaactaagaagaaccttttatgttatccttaaattcacttcattcttcaggatctgtaagatatttttgccattgacagctgatatttatatgatgttagaccccatcctgggcacatacctgtgtcccgtaacattgtgtttataattcagaataacatgtagaacattccctcagcagagaagtatattaagtgtcataccatgaccaagatgaaatacttctcaacataatgttttaaaagataaggaaggcggtagggctagtgcttatattattgtcttctttgtttctcttccttattttctgtttgtttgtttgtttttttcctgcactgttccatgaacgtaaaaacacagagtaattcaattgggaatgaatgaaagtgtcacttttaaagaccagtatcaaggaaggcttgaaactgaacatcacccaagactgtggaggtagctagaagatttcaagagggaggttgtagttttttagcaaacagcatcgacaagaacaaatgctttagtcagtcgctgatgtttgctgtcctgcctgtaagcctgcaatgtacacaaactcctttgtgaaacaggtggaggcaatgttgagaaagttgttttctggaatagacagactggctcctgggacaggttctgccagctgaggtctgtgcaatcttgcctccctgccagggccatgggacattcatcccctgaagggttgccacagagcccctggctttagtgggtgttcaaggaatgttggttgcctcaaaaacaacaaaaacttgggcttgaaaggagaaagatcagctgtcaattggaagagtaaggcattgcaaaaatgccccgaagtgctgctctgtgagttgtgaaactttctcagaaaggactgagaacctgttcttagaacttaggttctgttgcatcaacatttatgcacatatctgggtcctggtatttgctgactttgaagatgattgtatcacttttcctttccaagggaggtggaactgaaaactaaataagcttgctatttacacatgctcttctaacatttaatagagtaaacattctctggggtgaggaagatctctctatggagctgtttgctctgcagtagtgagatcttcagagccttcttccctcactctctgagtgtccctccatccttgcttttacctcactgtgttatcggtgtcaggctgtgtgtctgttactcccagtagtcgctggagcctgaggattttgacacgttaccaaattgacatctacagtggttttttaaagttccactcccaccacaaacacataaaaacgcctgcttcctaacagcctttagaatggtggattcttagtgttgtttttcattctgccagccaggtagatagcaaacatggtattcctttgctatttttattttttattaagattgtatatgtatttttcgtagccacccaggatagaagaggagtttttattcctgcatgtctcttttgttagagagagaatttttttctgtaaacccttctcctacccatcttaagcctcctgaaaagggcatatggctaccatgagcatctcaagatggtcctgattcacttcctccaggaactggataaagtcaggattctactggcaaagctggaggaaggctgaggggaggcagtcatggtgtatttcatgtgctgagtggactctggattgatcgaccaatgccttaattaccatttaaaatagggcaaagattctgtgttttcaaataattttttattaatgaaataattttgtgatcattattaaaaacttggaaaaatacaaagaggtcaaagaagaaagtagccaagagtcccaccacccaacaattattgtaatatttattattaaggtttttgtacattttctctggtcttcatctttgcatattttatatgaatctaataattctgtatatgtttatagcagtcttttcatctaaagccatagcagttattttttatgaattttttaaaactacgtgccgtttcatgcctgtgtggcattctacagacttggagaagtctcatctcattttctattactgcacagaaggttatttcattttttttcctccagtgttaccagtcataatgccgtaagtgtcttcatgtataacacctttttcagtttttagggtcatttttatgggataagttcccagaagtgaaatggttgcgtcaaagggtaggagtttttttttaatgccaaatagtttttccaaagaattgtccatttacactgccaataatgatgtgtgcaaatagagctgttttatgtcaattagtttgtatccgagggaaatgggtcatcaacctcttcccttttggacctgtaagggttgaaacttcattcagaataaacactaataaaagcttaaataagtctaatggttgtggttcaacagtctctcagggaagcttgctgcaaagtttaattgcctaaggggttttatttcctttcattttcttctcccctctgctgttttcctccctccctccaggtttaaaatgtgttttcctggccacagttaagccttagtacgtcttgttctgtctttgttgattaatgagtataattgaccctgtcatctctattataccatccacagcaatttgtttttatgtcgcagttattttctgagctgtcacaaaactgccttacaaagacagctcattatcagcccaaaggaaaagaatttgaaatgatgaagtgagtaaaggtcccgaagaggaggaggaggaggggacagaggagtctaagctgttggaatgtcagggaaatgagcatgttctagggacggaataattaactgttgcttacaacatagccagcaagacttgattttatctagaaattatcagattagaaatggctctccatagacagagtgtggaggactgggtgaatagatagaaggcctgaatgtacgtccaagaaaacacgaggcatgacattttagagagtgggttgaagctcattagaagttagttatagaaagcccagcttaatgtctttgtgtagggaatagcggtgacttccaggtgggaaagttttatctgaacatgtatggaccataaagattacccacatgccaggctgtgtcagaaaatgctttgctatttttctatatagttttctctcatttccctcctccccaccccagggatctcatctagttttcttcactcttgaaattaactcaggaaatagcagaggtccaggaagagatagtggaacagaaggagatcttgactttaacaaagtccgtcttccaaaaccccagacagatgggatcattgtgttacagagatgtgtcttcacagatggagtcgtgagtcttcttagaggaatgccttgttaggtaactgctcgtcatccagccacgttacacttttcttttaggagcagagaagggaattaaccacagagagttgggggaaaaaaatccttagtagcaacagtaaaataattagtgatggtggttctgaatcatagaatgtgacagcagagggatctaaaagcttttctctttatttactttattttatttatttttatttcgtgttttgagagacagagtcttgctctgttgcccaggctggagtgcagtggtgtgatgttggctcacagcaatctccgcctccgggttcaagcaattctcctgcctcagcctcctgagtagctgggattacaggcatgcaccaccactcccgcctaatttttgtatttgtagtagagacaaggttttacgatgttggtcaggctgttctcaaactcctgacctcatgatctgcctctgcctcagcctcccaaagtgctgggattatgggtgtgagccaccgcacccagacgcttttctttttattttgtgaatttgtagatgaggaaagtggggcacagaagatttaatctactttttcctggctccctcccattactgggagagctgggtcttaaacccagataccctcttctccagttccaggccctttgtcctgttaagaaacttctccgtttgacgtgtcttgaggctaattcttctacagtaatatgaggctttgatccagacagctccagagaaactacgctcaaagtggagggttttcttaattgtagagaaactcacattacattaccttgtttgtgagatgtgttctgttgtattcagaaaggttcagaagaaagtcggctctggtcctgtctagaaatctttgatgcaggagccatttagctggaggggagctttagagagaagggcaggagaaagggcaggtggaagaactcgaagaacctctttgaaagtggctggaaagaattttcagtctttatagaatgaaacagctgtcttaagaaagaaggggacctgccactgatggtcagcaggatatgggaaggtcacgggtcagtctctgggacccaagaagcacagctgcttttttgcttaactgtcaccctcccatcttaaatatatatatatatatagggctgggcggggtggctcatgtctgtaatcccagcactttgggatgctgaggtgggtggatcataaggtcaggagttcgagaccagcccggccaatatggtgcaacctcgtctctatgaaaaataaaaattagccaggcatggtggcgggcgcctgtagtcccagctactcaggaggctgaggcaggagaattgcttgaacccaggaggcacaggttgcagtgagccgagatcatgccactgcacttcagcctgggtaacagagtgagactccatcacaaaaaaaaaaacaacaacaacaaaaaataggatatattgagattgcttattgaaaataattcgtattctttgcttgggaatacaagtggaggcaaccagtatcttcagtgtcttgagtttctttctttctttttttttttttttgagatggagtcttgctctgtcacccaggctggagtgcagtggggagatctcggctcactgcaacctccacctcactgcaacctctgcctcacgggtttgagcaattatctgccacagcctcccgagtagctgggattacaagcacccaccaccacacctggctaatttttgtgtttttagtagagaaggggtttcaccatcttggccaggctggtcttgaactgctgatcttgtgatccacccgcctcggcctcccaaagtgctgggattacaggcgtgagccaccgcgcccggcctatgttgagtttctttaataaagaatttccatagtccctctgcatctgatttagtaactaaaagtccttatgataagtgagtttgcactcatagaatctgtgacaatatggggaaaagaaactgggggatttggataaaaaaacataagaaatctcttagagatttacttcatgtagatttccaccaacagagagcactgtcaatgaagatactaggggcatttacacacttcagtgaatcacagttggactgtgtttttcctttgcttgtttacaggaaggttttgacacctcactcctttttccttgcctgtccattggtttgattttgtgccgatgagactcccattaagaggcattttcctccctgggttatgcctttcttaggtataattcagtcctcttttctctcacctcgtctcctgtcttgccatggccatgatggacatttatatagttgcatcttccccccaaaaatgaagtgaatacaaagaaagagagagagagagggagggggagagagagagagagagagagagagagagagagagagagagagaaaggaaagaaagaaagaaagaaagaaagaaagaaagaaagaaagaaagaaagaaagaaagaaagaagccactttagtaggatctgtagttggttacattcagtgtatatgaagagttgttgttcaaatgcctctctcagtatatccaaactgcccccagagctttgcagcagagacctgcctcctgcaattctcatgttccttcagcctcagcaggtcagttccagggcaacgtttgccttccttccctcatttctctgggagcttttctctccaaaccctctactctttgttgccctcttctctaccttctgttactttttaaaaagtcgtccctggtactgttttgtttttttttttttaattttttatttcccagtaaaatctcatgttttccataaagacaccgaaaagtaagctcccacgaactcaggcttcctatgaagggagatgtcattgtctatctctgcacagtgcgtggtgagagtgtattttatgccatatcctggctcagctcttcccccttatggcaaatccccccaccggctggtgccgccatgggtaagttccacccttcctcacctggcttcagatagtgtgttatagtaacgatggtttacctgtgtttagtactttaatttttccaaaatatttcatctgagcttatgaaatctgaagtgctgttaggcatcagaggacattatcttttgggagcctaaactttcaccccttctgattttgctcatctgtctgggattttgcttaatgtgcgctgttttatctgtgttttgtcattcccaggttactctggccaggacttcgactgggcagattatcacaagcagcatggggcgcaggaagcccctcccttctgcttccgaaatgtaagaagcttctctcttacctaatttttaaaaatcatagattttgtctaccgtaagttttataacttgctttttattgatgaagcacggttggagtattacagtgcactggagaactacaaaatgtctgtagtttttggaaagctctgctttcaggttgtatatttgctagggtgatgctggtctgtgctaacaaattgactaataaatgcacagtggctggaacatgctaaaaggtgatggccaggtctcacttatggaagagcccagggtcttcctgattagtaggtggttctcattatggtgagtaacctagccagcagaagggaaagaaatagaggagaaggtatcactagttctaaatactgcagcctgatagcagtgtatgttattgctgtttactttctactggtgggagctctttgcctggctgcaccatgtcacaggtgaggccagtaagtgggtcctgcctggacttgctgcccagctgtgattctgaactctggagtgaagaggacacgttttggtggacggctggccatctgttcccctgttagaggaacacttgctgtgtagcatcttatccacgaacccactgataggagagtctttgctcttgaggcctagtcttaaaatgctgtcttacctattttgatggctttaatactttctttgatgtccagttagatgctagtgacttctgtgctttgcttactttaagctactacctgcttcatatagagctaattggaacataataataggatttttgtgacacataaagtggcaatgagtgtgtgtgtgtgtgcacatgcgtgtacttacagagttattggaggtcgttttataaactacagtcatgcattgcttaatgatggggttatgttctgagaaatgcatcatcaggccgcttcattgttgtgtgaatgtcatagagcgtaccttgtacctacacaggcctagatggtatagcctatactacatacagctctgagattcatccatggcctggatggtatagcttataccacatagcctaggttatgtggtataaccatataatcatatgggaccaccattgtatacgcatttcatcattgactgaaacgtcactatgcagtacatgactgtagtttacaaaattatcaataattcttcaatcctaggaactgtgagtagagatatcaattatctctgttttaagaattaggcttaaatgtatagtctactgtgttcaacatgcttttagttaggaaagttaatttatgttaagacaaaaagattatagcctcctcttacttgagatctgtaacaacagtgcaaagcactcgctggtcagagacttgtttgctgagcatgtcttcctggagcttgcgggttcgttgctgccacactgtcattgcactctagacataacaatatgaaaaacgaagcgagaaaggggtggctgcataggcagaagttcaaaagtgagtgcaagtcaaaatcggagtttggaggattcagtaggttgatgactgggtcagctggtacttgtaaatacagaagcacatcagcagcaaggttggaaatcaaggatccttctatgattgaacgaccttgagaagcagctcaaatctcagtcgagttctctccttatctaggctgcttggagcctgcctggcacctgcatgatccggggagcagtcaaaaatctaggcagaatttacacatagaatttgtggttcccagtccgggctctccgcaggattgccaccgaatgatgtcgcctttgcacaagagcggtttctctgtatcttgaagaaccgagtggtgtgtgtttaggtgacagggccagctgcatagccatgcccccatgaggactgcagctggttaactctgaaagctttgatgtcctgtgctgtcttgacttctcaccgtattgatgtcacagtcacagaatctgctggcttgtctgctttcattgagggccgtggaaacatcttatagcaccctaaaacccttttgagattgtgttttgtacctgacaaggtacaaagagaaatattccttccccgaatcattaacttttggaagaaaatccttctctctctctttcattctatatttaaagagtgatttcttctatggcagtatagtccttgccccactaaagcttctttttatcagtcctctgttcccattcgcagccaggaattgtccacatggctttgaatggtagagtaaatcaccacattcccaggtggcttctgagctttcaggatttgtccaccaagatgctctctgtttggatgaatctgcgggcatgttcaggaggaatgtctttgtttctggcactccgtttatgtaatagataggattgttgacgtatgcatcgcattggtgatgctttgctgaatttgttagcttgctataagtgctctttaacggaatgcgtattacgagttcattttttaatcacacatctcctgtgtattagaggagagctagtgtggaattggatgcatggaagacatttccccagggatgtttaacagaggctgttatgaaaggaatcgacacagtaaaatgcttggtaaataaactcacaggtaacagttttgctattgatcctttataaattaccctcaagcggtggattgaaatgaaaataggttatgtggttgtagctttcccttgttaagaaggataaatgcattttaacttacttagaggtttttcaagcggccgatgggattgtattttcagaaggaagctcaatacataatagctgtgcgtgaggctgggtaacttgcagaaacaaatagcccacctagaagatctttgcttcctatttccaaagaaatgtaaaggcatggagccagttgatttcttaacatgcattggatcacttttttcaggttacataaagatatagttatatttttcaaattaagttttagaaaaagacatgtaaatgtgaattaccttgatttctttccacaagtcagaaaaagaagtagtctctgttacttacaggaacctgtttatcttggtatccataagtatataaatctatagtattataacatgtctgatgataatttatagtagttggcaatttgggaaaattttatatttattttaaaataatgttttcagtattggctgagtaagctcatactgaattgacccttctgcctgtagagcagctctaaagtctggacacaggaccaaaaacgactatttgaaggtagtggaacgtgagcaaaaggaggcaggagaacaggagactggacgaagggaatagcatgggagaattgtcccatttttttcagacttttagcttgagggcagccacagttgacgacatgtgggagagtgatataaaattcatggtctctctggcctgatgaaccatattacaaaatttgggcaaccacagatcctggaaagtgaggggagactcagacagtggagagccaggatcgggaaccccagattccatgtgtaaattctgtctatgtttttatggtgattcctgaatcatgtaggtgccaggaagactccaagcagcctaggagaggtgaactcaattgagatttgagctgcttctcaagaggcagagtctgtagtttcagtccaaccaaggtgatagcttgataaaatagaaaagttgacacttttggtaggaatataacgtaatccagagtcgccacaacataacatttaaaatatccattctttaattcccacattgctcaagacaaatgggaaaatcagcctcattcccaatagaaaagaagaaatgggaaaatcgcctcattatcaatagaaaagataatcaacatagactaaaccaagcatagactaaacccatcatgacccaggtgttggaatgagcagacaagtattttcaagcccctattgtaactaagtgtgatgtaaagcagtggtcctttaaagggtggtcgtgagaccagcagcctcggtatcacctgggcacttttcagaaatacacattctctggctccacctacaatcaactgaatcaaaacgttggggagaagcccagaagtttatatttttaaaagattttcaaggggattctgatcctaaagtttaagaactgtagatataaaggaaaatattctcataatgaatgaaaagataggaagtcccagagaagaagtagaaactataaaaaagagaaattctagaactcaaaaatacaatatttgaaatcaacaaatttattggattagcttaatcggaacgagagaggaaagagtccatgaccttgaaaatagaaattattttgtctgaaaaacagaagatgggcagggaaatgaaggacaaatggaatctcaggatctgagggacaattattatgtagaattgaagacccaaaagaggtggctgaataagaattaaaaaagacatttcatcaaagaagatgtatggatcacaaaaaaacatgctcagcatcagtagtcagcagggcaaatgcaagctaacaccaccgtgagacaccactagatacctattacaatggctggattttgaaaaactggcaataccaggtgctgatgaagatgtgtagcaactaaaactctcacacactgctcatgggaatgcaaaatgctgtagcaactttggcaaacattttggcagcttcttagaaggttaaatattcatttaccatatggtctagcggtcccatctctaaaaacaggcaaacttaatggtatgggttgaattgtgcctccctcaaattcatatgttcaaatcctaacccccaatacctcagcatgtgagtgtctttggagatacggtctttaaagaagtaattaagataaaatgaggtcctatggatggaccctcatccagtgtgactggcgtccttataagaaaagagggggccaggctcagtggctcacacctgtaatcccagcacttagggaggccaagatgtcaggagttcgagatcagcctggccaacatggtgaaaccccaactctactaaaaatataaaaaaattagctgggcatggtggggcattcctatagtcccagctactcaggatgctgaggcaggagaatcgcttgaacccaggaggcagaggttgcagtgagctgagatcatgccactatactcaagcctgggtgacagaatgagaccctgtctcaaaaaaaaaaaaagaagatggggattgaaccccagcagatcttaatggcttagctagtttccccacctgtaaaaatcaggacactcttactgctgtttgtgttaggtaattaacagccgtaaagcatgctgaaagtagaaactgctaaatacacacagaggcctgaccacatgaggacacagggagaagacaacatccacaagtcaaggagagagacctccaaagaagccacccctgctgacaccctgatctctgacttccagcctccaggaccatgacaaaataaatttttgttgcttaaacttcacagtctgtcgtattttgccacagcagcctgagcagattaatatacttacgtttacatgaaaagttgtaccagaatgtttaatgtttatggcagctttaatcacaatcactgaaaacgactcaaatgtcctttaactggtaagtggatagataagctctggtgcatctgtacaaactactcagcaagaaagcagcacaaacttccatttcatgtaatagcatggatgaatctcagtgtattatactaagtgaaagaagccagactcgaaaggctacagatattgagtccatttacatgacttacagaataaaatggggattctgatcctaaagtttaagaactatagttatacaggaaaattttctcataatgagaatataaagaaatataaaggaaattataagaacagaaaacagattggtggttgccaggaactgagtgctttggagggactaattaccaaaggtccccaatgcaagggtattttgggggtgaagggatggttctgtgtgttgattgtggttgtagctgcataatgaaattcactggtctcacagccctaccctcggagaacagtatacccaaaagactgaattttactctatgtaaaaatgtttaaagtgatcttaaaaagatagcaataaacaatagcaataaacaaaattagcaataaacaaaaagaacaaaggaaaataatagcaataaacaaaaagaacaagggaaaataaagatagtttcaaataaaaccacaagaattcatcatcaaaaagaactacactattatgaaaaaatctttttttttttttttcctcatttgagacagagtctcactctgtcgcccaggctggagtgcagtggcgagatctcagctcactgcaacctctgcctcccaggttccagtgagtctcttgcctcagcctcccgagtagccgggattacgggcatgtgccaccatgctcagctaatttttgtattttagtagagttggagtttcatcatgttagccaggctggtcttgaactcctgacctcaagtgatccacctgcctcagcctcctaaagtgctgggattacaggcatgagccaccacacccgaccttttactacgaaaaattctaaaggatatttttcccatttcctgtaaaggaaaatgatgccggatggaaattccgtgttcccacttgaactgttatcaatgggtataggaaggtggaggaaatggtgtgtacttcagtgatcccatagaaggaagggtgcagccgggcacggtggctcacacctgtaatcccagcactttgggaggctgaggcaggtggatcacaaggccaggagatcgagaccatcctggctaacatggtgaaaccctgtctctactaaaaatacaaaaaattagccaggcatgatggcaggtgcctgtagtcccagctactcaggaggctgagttaggagaatggcgtgaacccgggaggcggagctggcagtgagccgagatcacgccactgcactccagtctgggcatcagagccagactctgtctcaaaaacaaaaaaaaaaaagaaagaaggaagggtgcatatggaactggaaagagaatgaattcatactctcactcgtttaacaaatagtattaggcacctactatgtgctaggcatagttctaatttctgggaaacaaaaatgaagaccacctggttctttcttcatgaacagtgggaaggacaaacacatacgtgagcctgtcttgtcgatgtaagatgcgtgtgcgtgcatttctttctctttcttcatctgcccagctttgtcctgctgcgtcagcactggctcagtgttggtctcgtttctcttgcagacatcattcagtcgaggtttcacaaagaacatgaaacttgaagctgtgaaccccaggaatccaggagaactgtgtgtggcctccgttgtgagtgtgaaggggcggctaatgtggcttcacctggaaggtacgtactcgctgggggtagcagtcgctggggggaatgtagagtttgtcgaaatggcaacgtgtggaggaaagcagcccttctcagaaggggccttacttctctttcatttaaacagatcttaaattattccgtgttcttaaatcagtgaaactaatcaaacataaatgtagtcagaggctctcatcttaactaataatttcatgcaatgagatgctggcaagataattatgtttggaacacagtggtctttttacatctatgattagaaaagcaaatgtcacaattaaattaatgtgagtcactaaaactgagattccaggtctcggttattatcaggacaaaattgtacatttgtattttaatgtggttatatcctttactttgatttctttcgtagttgtttaattcttcctcaaaatagtacctggaggatgactttctccccaaatgtctaataaacagaatttaggcttgtttgttcagtgatgttgaaactatcctttatagctatagcgtatttacaggtgcaagaaaattcacagaatgctgtattttgtgaacagaatcctgatcatactttatatttaagtagaaaaccatattttctaggtggtgggttttcagtgataaatatttacaatggatttgatctccaagactttcccatctttctgtgatttataattctttggttttttttcctaggatttcataatactcagtagttatttcaagtatatatgcaaaaatgaatagatatgaatagtaaaataaagttagctctcctagttcatagtttaaatcttacgacttactcaataccatgattggaataaagagtttagaaggaaaatcatagaattggtgctcagatctccatttttatttcctcactatgcatctataaaatgtctgcaaaggtcttaaataagcctacaatctcatacatatgtagtccaggggattgggaaatgtggaaaacagtcattgtggctgacatcattgtgttgccaattcccagaaaattgtttaaaacgttactgaagtttagggttccaaaatcaatgtgaaataaatggaaattcccaaaaagttgattgcttagtaggttttcaagtagaatggcctctttctggaattcacgaaagtgtagacacaggcaacgtggcaacatttctgtagcttacaggaatagaacatggctttattttcacagctccacctagagttgggtgaactgctcttggagaagcaagattccttctgtattttgtaatgactaaatttaacttgctatctaacactatgctgagccatcttaacaagattggactcttgtttgcattattaatttgaaaacaaaaatggtcaagttaaaagcccatgttttatccttattacttagtgcgttatggttaaaattcttttgcagtcattatttatttagcagtttctactttcagcatgctttatgactgttaattacctaacagaaacagcagtaagagtgtcctgatttttataggtggagaaactagctaagctattaagatctgcctggggttcaattccattgctcttgacattttctctgttgcttaattccccagaccctacggcttcccacgtcttaaaaaagagtgatgaacaacatttagtgtatatttaacattttgggcagtattttcttctttgtcctgttctctttgaatacagatttttgattttctagcaaagaaatagaagtcagctcatgtccgatctttttcttattccccagagtgttttcattgggtagtgatgaaaattagttagtgttaggaaacagatcagaaaatatacattgaccatttttccagacctgattcattgttctaaaaagtgtttgtaaacagtctgttgagtcttatctgttgaatagtatattacctgtaattattgctcaaaatcatgcatctttttcattacttacaaaagatactgcatacaaataaagtaaaattccagtcagtttcctgggtcttgcttgaattttggttttggttttgattttggcccttactgagcactgacctttcagagtgacagcttaatggcacttagctctcattatttcagttttatctatctagtgtttcctttcctccatgttgggaataaaatgatagagtttcatcatggtcactttgtggctgctaaatttttttatctaatgatgattattccgattataggccatttatttgacactttaaatttataaagtactttgtaacaattttattagttattttcgtgcattaaattgatttgaagtgttttcaacactagactgaccacttttaggtaattaaaataattctttctagttaatatctgacttctcttgaagttgattcattctttacgtgtctctaaaggggctgttgttgaagagggagcaatgaataaactacatgagattaatgtaatatcattttaagtgcatatttgaaaagaattttaagctctcagaaaccactggtagttagcaagggtgactgatgatgatggggccagtgttccggaaaggaggcagtgccttctcctaggtcagtgttctgctgcaggtcatcatgtctgtaactgtgaatattgttcatataatacaagttactttcagtcttaggtctctagcattatggccgcacacactggctcccacactcacagctctgcctttccacaaaccaagtgactttctattcatttccagtcctttttttatgggacaaatacattggtccagcagttcggtatgctctcctagctctttagcccagaagaaggttcgcctgcttgcattgtcttccttagcatctttttttggagtcttgtttctcagaatcatttttcctggacacctggctaaatatatacatgcacgccacttacatgcacttcaaatgagacctggtagatttctagctcacgtttagcagttaatgcaagagattgacaagaacttttgggtggtttcattgagatattttattgaaaaaatttttcatttttaagaatggttttaaaatatatgtaacatcaaatttaccactttagtcattttaaattatacagttcagtggcctaaagtttatttacacagttatatacccatcaccaccatccatctccagaacatttttcgtcttgcaaaactgaaactctctccccgttaaagtctcccttccctcctcagcccctgactggcaccattctccttcccgtctctatgaagttgatgacttcaagtacctcacatgagtcaaatcatgctggatttgtctgaaaatggccttttacaagatttattatcaatcataaataatgctttatgtttatctactttcatcataatttaccatattgtctttttggtcctcatagacctggccacctattggcaagaatattaaattgtaggtggcttgttgttaatggaggactgaagagttagttgatagaggggctggtcctgattcctcggcttccttggaagtgtccccagggacacattaaaaggactagggacacagaggaggaagaacaggtttggaaggagacagatttgaatagcaacagttgcattttaagatacggatggggattccaggtgaggaggcatagggagtggcgggaattttgacactgaggccctcatcagaggctacaggatatgtggggacggtgaccacaaactttgcttaaacgaggagacttttagaagcaaacggggcactagccagatggggcactggcaaggaggggacagcaagatagctcggtagtcacttgagccactgtattagtccactttcatgctgctgatgaagacatactcaagactgatgagaaaaataggtttaatggactcacagttccacatggctggataggcctcacaatcatggcggaagctgaaaatcacgtcttacatggcggcggcaggagagaatgaggccaagcaaaaagggaaaccccttctaaaaccatcagatcttgtgagacttgttcactaccatgagatcagtatgggggagctgccccccatgattcagttatctcccaccaggcccctcccacaacacatgggaatttggggagctacaattcaagatgagatttgggtggggacacagccaaaccatatcagtcaccatgatctgcggtctgcgatgggagcggggtcggctgcagtcacagcagtttggagccaggcagtgccaggtgtgaacgcaggctcctggtggccctgtggccttgagcacgttgcttaagccctggtttccccatttctaaaatggcaatcatggtattacttatagcaggggcttggtttgcattaaagcagttagcagagtttccaggaagaattttccgagagagaatgaagaggaaattctcaggagccagagagggactctgtgatggacctggttccttgagaatgtgctcaagtcttaggcactgagctgctcctggtggctgggatgaacagacaatcccatgggggtctataccgcctagcgagtttgtctactgtgttcgatgcacggggagccatccctagtagaccctcaagccaaacacagcagggaaggaggagggaagcaggtcaggccctgatgtctatgaagttgagtcagtgggcttaaattcatcggccagccgccctctggcacctgcagcggactctcctccctgcagggttctgtgctgcctctgcggggccctgcctccatggatgtgagccatgcaggtgaacccaggttctgattgcctagggagggattccagtgcttggttgagcagagcagtgccctggagcccccatgtacagtgttggataaaacaacccctgcctcaggagatgattgcaacattaattaatctatggagatcccctaaaacaggttcaagaccataggaaacatttggaagatgttctgtatatttttgttttgttttgagacagggtcttgctcttgtcacccagactggagtgtggtggtgtgatcacggctcactgcagcctcagactcctcaaataatccttccacctcagcctcctgagtagctgggacttcaggcacgtgccaccacacctggctaatttcttttgtatttttagtagagatgcgggtcccactatgttgcccagggtggtctcaaactcctgggctcaagtgatctgcccaccttggcctcccaaaatgccgggattacaggtgtgaaccaccacgcccagcctgttttctctgtttttgtcctcatcatgattcatacacttttcctcctatttagaaggaatgtgatcagctctctcttccccagtgctgagtattttagccttttagttgaggcagaaatgcctttcatgtcacaagagttaggaagacaagcagacttccttacttctgagttatttagctctttcagttgttaccactgcagaaattgttgaagagagctttagagtgcgaataacaaaacccagttttgaactggggagccctgttataaattaaaacaggcatggaatctgcagttagtgtttttgtgctttgaatgggtgggaaaaataaataatgacaaaacacaccctacaggtatcaagctaggaatctgtgctgtgcacagctttggacagtaagtttttggagttcaggaattgcctccttgtaccacgaacttcacattccacactgacaagcacagcacttacgtgcaaggcaggtccgctacgtgtgtagtttctgatttctgcaagtgtgtttgaggagcagtatggggatcccataagtccgtagaatttcctcataggtatttaaacacaagaagcagtgatagctcaggaataaatctaatctgtcctttgcccatcttaagaaatgcgtcactctgcaattgtccggtggcatcttcccatttatctgactggttggtggaggtgggttagttctctgaactcatgctgttatgctggcctttccttctccacttgcttcatttgtacccagcatccaagacaggaacgcaacacagcaacccacaggggaagttccccaacctggcagggccactgtcctctcttcacctgctgcagtggcctgtgttcttaagagtggtggccggaagatgctggacgttttcttaacctcttgttaagaaggatcgcatatattctccatctcctgctttggttggttgtttcttgctttttactcgtgatgttttctttttagtacgtttctctaccacccttggtgacttctgtctctggatgttcccactcctttcctggttgctcctctgtctcctccatcttctgcacagtcctggggtggcagggctggctcacttcccaccgttggctcctccccagatgacttttcttggcctcttctttgccctgcttttctcagatgtagaggttagaatcccccagtcctgctcttcagccatctgtgcccagcgtggcctcgtctttctctgtggctttggacggtcacgctgtgcacacggatctgagtgcccatgcccatggcatcacacacggatctgagtgcccgcaccatggcctcgcacacggatctgagtgcccgcgcccatggcctcgcacacggatctgagtgcccgcgcccatggcctcgcacacggatctgagtgcccgcacccatggcctcacactcacaactccctttccatcccctgcaaaacatctccacgtggcagcagcatttccagaacagaactcaccagcagaaccgtcagaacccgtctctgctcttctccgtgaacgtcctggctgacgaatgatgccgttattcacccaagtcggaagccacggcatcctcaaagttagaaactctacaataattcctgccctcccaccaccacccccacaacccatgagtcacttcagtccggacctccgcctgtcctcttctggcccccacattgcactcaggccctcctccctggctctgtgatttcagccgcctcctacctgctgtctctgccctcttcatggggctttgaggttatttctgtaaaatacaggcattgccttcctcctaatacacagtaggtatgtgtttcttttttttcttaatttttttattttactttaagttctgggatacgtgtgcagaacgtgcaggtttgttacataggtatacatgtgccatggtggtttgctgcacccatcaacccgtcatctaggtttgaagccccgcatgtattaggtatttgtcctaatgctctccctccccttacccccaccccttgacaggccccagtgtgtgatgctcccctccctgtgtccatatgttctcattgttcagcttccacttatgagtgagaacgtacagtgtttggttttctgttcctgtgttagtttgctgaggatgatggtttccagcttcatccatgtccctgcaaaggacatgaactcattcttttttgtggctgcatagtattccatggtgtatgtgtgccacagtttctttatcccgtctatcattgatgggcatttagcttggttgcaagtctttgctatcgagtagagactaaattccataacatgacactcagcaacccatcctctgtaggcacatatgcttcctggatgtgtgaacttggcactttctgagtgtaaaatcttttttatttgtacagctgtataaaacagctagtgatagagtctcttataggatggtggcaagtggatgaacatcgatagagtgtaagagtcatgttagcacgtagtagtcattgcttagtaaatggaggttgctgatagtattattaggcagcacttttcttttaagatttgccacctgcgggagcctgtgctccagctgaaaggagcacttgtgtctgcaagcctcctgatttggttcttggtgctggacactgtcccacagggctctgttcctctccgtgcacctgacaaagcaccatgtttttacaggcggtcctgtgaactttgcttgctcagcgtttgctgagtagatctgaggaagaaataaaatgtgtattcctaaatgaaatagcgatttaagatacagcagtccattaagaactgctgtttggccaaccgaatttggggacagtgagatcttttatactggaagctaaaattcagaaactccttgactggtttgtctctatgactgactgacttgagttccagcaaactgccctccacatcccagtcaacggggtcctattagaatgcacatttctcccagacctagtgcctccaagtcccttagcagtgtctctgggaatctgcatttgcaaagtctccctcccctgatgtttctcatgcagcctagagtttgtaaagcactccagtaggtcaaatggggaatgcatggtgtggttcagagaaacccgtctgagcccaccttgtatgtttaggggaccagctgtggaacaatggtgtggttcagagaagcccgtctgagcccacctcatatgtttaggggaccaggtgcagaacacagccccttaagtttttccgtaactggcaaaaaaagtcaggtagctactatgcattttggagatacttgcaaaattgaaacaagggaacatgtaaacgtgaaaacaattacatttcaagccagggtgggtggttttaaaacctttacaaagaagaagtatggcctctatgaaaccttagggggagaagctgcttcagcagatgagaatacagcaacagtattttccagacagttaaagcaggtgacccacaggagctgtctcggggaagaggcgtttaatcccgccacaggtgtttgtttggaaggctgctgctctgttaggttttgggggccagcagcaggactggctctggctgtcataagtccattgggaatgatttgggaagactgttgaccagaggccggggaatcgcctctccagaaggctctgcagcaggaaccatagcaaagttcaggttttccagctgccattgtggtgcatgtgacttcccggtgagcacattctcactgaaggggtcccaagcctgccttcatctgcctgcaggtctggggttgacctggcttttcctgtagcagcaggcaacagctactacatggtgggaattctgcaagaactgtatggggccctaacaggagggagacagttgctagacacataccccccacccagaaataaaaacgaggaaggaaaaagatagccgcccaccccaggtgctttctaaggctctggagctggactgcccaggtttaaatccttcagctgccacttgccggccgctggatttcttccggtgcctcagtttactgatctctgaaatggggatgaaaacaccccgtatctcttagggttgttgtgaggattgaacgcttggaatggagtaagcactgtgtttgctactgtgtgggtctctctcctctctcccctccccacaccccccccatactcgtctaatcccatttctgtcatttccttcagcctgtttcctatgataccttgatcctggccaccagtttcgcccaccgtttttggttttgtttttggttttgttttcccaggccttcggctccagagctgacccagggaggctttgcgcgctgggcttcttgataggcatctgcaaagggaacacgcccagagggcaggtggggcttccagcgtccaggtcttgcttgcgggcactcacaccggctttgccttctgctggtgttttgcctgttcatctcacactcaagcctgtcagcatttgccatgccctttaactttcagtggggacatttattaggcaaggttaacacattcccttaaatacttcttttccttcttctgattccagcctttaactgagctgaagcagttgttccgattttcttcctgaaggaggtggaacccatttgcctcctcatggtgggcttgtagcctccctcgccctgggtccctcctgcctctgctgcccagtggcatctctcaccccaagctcatgcatgctcgcgctctctcctgtgattcgctctgagtgaagtaattacataattttaggagtttgatagaactgtgttcctaggaagacactcaggtgtcctcccaagccataagcatctccctttttcatcctggggctctgggtagcataggtcactgtctcgattacagtcacctgtgtcatcggctgggtggagccgtggtgtggttgcagtgagagcaccaggtagacctctgtgtcctgctgaaccggggacaagggggtagcaagctgcagaactctttaaggttccaaagggattctcagaaatctgttatgaatttagattgtgagtacggaaagtctttgttctcttagaaacggaaatgttgattgctgtttagttttattttccttcatggtaattggcccctcattaacctgacctctgtggcaataccgtatttatgtataagagtcttactttcttctctgggtgtctatggttgtattgttacaatggtggtgattgtggaggccttggttgcaaaataggtaactcattcacaaaggccaaaaaatcataaaggtttatcttgggtcagattctccctccactcctgtgccccggcctccagccaactggttcctttccctgtggacacccactgtgttagtattttgcatttccttccagatttattttatgcacatatgaatatatgttatttcccccttttaaacagatggtagcatactatatatgcacagtgttctgcaccctgccttttatactcggcagtgcatcttggagatgtgtacatctgagtatattaagaggtgtctgattcttttttatagctgcagaatattccttcatatggatatacccagatttacttaagtgctttcccatagatggggaattaagcttcctcatggtttttgagacgaaggttctggataaaaataaacaagtagaatccatactgaccagatgcagcttagccaaagtcaagagattgaacatggtcttgtgttgtttgtcggggatttttcgcttgatcttagccaaaaggccgagaagcaatgtgtcaggatttttctataaaatgataaaggtcttcagtggaacattcagctttgcctatgaactttttgcaatcctcaaataatcaaggagaagcattgtggacattcttttaatagattattttgcatgctattgggtctcctgtcttggaaaataattagtctgagtccagccagataaatgtagactcataagcttggtaaagggaaatgaagaacttggtacccattatttagaatgggatttgtttagggtcagaaacactttcccaggtgataaataactgacttttccatcagttcttatttaatagatgccttaatgggatatatttggggtgggagaaggcataattgtaacctttttgagggaaaggtagccgacgcatctgacctcataaatacttgtttaattgaatgggaaagatgatcaaaggattctaaagtatggtaaagacggccctagcaatatactaatgtatacattgtactgaagcgtatgtattaaagccataatacgatgtgatgtttgaattagcagaacattggaagatgaaagttgtaattgaggaaggaataagccataaagttactttttttttttctttttttttttttgagatggaattttgctcttgttgcccaggctggagcgcagtggcgtgatcttggctcactgcaacctccacctcccaagttcaagtgagtctcctgcctcagcctcccaagtagctgggattacaggcaccctccaccatgcccagctaattttttgtatttttagtagagatgaggttttgccatattgggcaggctggtcttgaactcctgacctcaggtgatccgcccgcctcagcctcccaatataaagttactgttatgcttccttttgaagtactacttttaatgaccttgaaaatgttatttgtagctaaatgtaaatctggaaagataaatatatttagtagaggaatctaacctgttagcaaaatgtttgagtagctaagaaacaaatgctctttgggtctgcggaggagaaaatgaccttgtgtaccaggaacctgcccggggacctgctttattggactctggggaatcaatcccacacccttcaggacgggcagaggcacttccacattggatgcctctggggagagtctctttacgttttgtctgttttgaacatattctttcttgtttgattcctttagcaattaggctaaatgttggtcaagtcttacaatattagacagaaacaatgtctatttatttaaccttgttcaaaaataagccctgtgaaccttctagcattcctttaaattctatattctttaaattacaggggaattaaacatttaaaaagttaagactgacagtggtgataattgatttgagaaccaatcaaaagttcaaaatgatgaatgacaatgatagtatgtgtgtgtaagcacctgctgtccatgttcagagcacctgagatacaccaatatattggcttaactctaaattgggaccccacgtttagcaagtaacatactccatcttcaccatgtctacttgacgatgaaaagtcagagccggtggagctcgcaccagatttaggaccattttgtgtttggttgttggcatttagcttcgtgaagttatggttttggtggggagggaggatgtgattcagaatccttcagatgttatgagatgacttggatggtaatggggctcaccaggttattttcttttctctctccttcccttctttccttccttccttccttcctttctctttctttctttctctttctttctttctttttctttctttccttctttccttctttctttctttccttctttctttctttcctttctctctttctttcttccttccttccttcctttcttcctttcttgacagtgtcttgctctgtcacttaggccagagtacaatagtgcaatcactgctcactgcaacctcgacctcccagacgtgagcagtcctcccacctcagcctcccaagttgctaggacttacaggtgcctgctaccacgccaggctaattttgtattttttgtagagacaaggtgtcttcatgttggccaggctgatctcaaactcctagactcaagcaatcctcctgcctcggcctcctgagtagctgggactactggtgcatgctaccatgccaggctaattttgtattttttgtagagatgaggtcttgccatgttactgaggctgatcttgaactcctaggctcaagcaatttgctggccttggcctcccaaagtgctgggattacagtcatgagccaccacacccggccactgtgttatcttcatcttggttctcaatgaggaaaccaagcagggctggactaaggggtcagagtccatgggtcaccgtctattaatggagctctgatctcttgattcctggttcaaagtgtttttttcttaactattgatttggtgtcgaattttcttcttttaactagttccaaatttattctctccatagccagagctccttgaaacttttgctgctgttaaatccagtcttcttgtctttttcagagtttcatggctgtgaagccaggtcctcataaggcatgactgtaattacgaaataggatgtgacagtcatcaggtcccacattttagtgggatcttttagacattgctacataagtgacttttctatgacatagccaaagtctacaggccacaaactgagttcaaaacaaagtaactccaaactgataagttgtcaggtttcctagagaagggccttgtccacgtacactgctcataaaccttgtttttgagtttgactggttccgtttagctgtgatgcttgactttctttcattgaaggttgcctttacttggtgttaggtggagcatatcatgaaggcttagatgtgggccctgaggtcccaccccaagctccgatacattcccttaaccccagagctgttcttaggaaagggggatgcttgttctctctttcagccaatcctgctccgatgccaatcttttcctacggtccttcttcctcttttacttttagggcagagtatctctctttttccaaaccttcgttttctctgaaccccttttattcctgcctttttatatttcaaggagttttgtctctgataagattaaagactcctctaaagtcgtctcttccatatggctattttgtttttgtttttgttttttaatgtataaaggaatgtttttccccatgttagggatgctctattattgttgtccttctatttctttgttggtaagatctgtttgtacctcttgtttcaacttcttcccatgcagggctgcagactcctgttccagaggtcattgttgatgtggaatccatggacatcttcccagtgggctggtgtgaagccaattcttatcctttgactgcaccacacaaaacagtctgtaagtggttcccagttgagggggggtggatgacaccagtgatctttgtgaataaattggcagcttcataaagaaattataaccaagttctaaagaacaaataagatttttgattttccaccaagaacccatgttttcatgatctcgcttaatctttaagtgtttgcatgagatgatgtcacaggttgacaaactttaacagtgagggacagttgaaagtcacagagaggcagaggaaaaatatctgaaatcatcactctcagttttttatacaattcattgttttgatgtgaaaaaatatgttagatactatattattgtgttaccatttctttaaaagaactgatttttctcatgtagcttctcctaacagaatcttaattggttccaataatatactgacattcttataaacacttaaccaggctaggcacagtgcctcattcctataatctcagtactttgggaggccaaggcaggagaatgcttgagcccaggattttgagaccagcctgggcaacatagtgagatactgtatatacgtaaaaaaagaagtacatatataagtaaattagtcaagcagagtgacacgtgtctccagctactctggaggctgaggtgggaggattgcctgagcccgggaggtcaacgctgcaatgagccaagatggcaaccaagcaccagtagactccagcgtgggtgacagggtgagactctgtctcaaaaaataaataaaataaacagcctactcttagcactaactaatcactgatatttcaactgtactttataaagtatattaccacacgtccctttggttacagaaataccaaataaccaatattaacagttaacccagcagtaaacgcccattcatacatgtgtgcacacacgcacatgcacatttaaatacatgcaaaaaaaaaatttttttttttttaaagatggagtttcgctcttgttgcccaggctggagtgcaatggcgctatctcggctctctgcaacctccacctcccgggttcaagagattctcctgcctcagcctcctgagtagctgagataacaggcgtgcgccaccatgcccagctaattttatatttttggtagagatggggtttcaccatgttggtcaggcttgtctcgaacttctgacctcaagtgatccgcctgccttggcctcccaaagtgctggaattacactttggccacgcctggctaatagtgtgttttaacatatttttgtaggttattgtcacaaaatggtaccatttaaaaatcttctaacctaatcattgcgtttattattctaccctaatgcatatcagaagtgttatttaaaatgatgagtccttagagataacaggttttaactgttaaagagattccgtctctgacattttcttgatggaatttaggcaccaactttacttcttcctaacagcctgttctgtggccacttctgtagactctcacaacgttgctggaaacacagttccattgcatagctgacttcacattccctgatggcgacagagtttcagggctcctctagttagcattattaagagcaccagaggacattatgtgtgtgaaacaagcaggtagttcagattagagacagctggattctatgggattctccttttcctaaaccatcctgcccaatggatctgattcagttggagtaatcgtttccccttacttaaaaatatttctaaaacattgagtgtacaataattattttaatcccagggacattcttttcccctgtctcttaaaatgatgcagattctggccaggcgtggtggctcacgtctataatctcagcactttgggaggccgaggcgggtggatcacctgaggtcatgagctcgagaccagcccggccagcatggcacaaccccatctctactaaaaatacaaaaaattaaccaggcatggtggtgcatgcctgtcattccagctactcggagggctgaggcacgaaaatcgcttgaatccgggaggcagaggttgcagtgaactgagatcatgccactgcactccagcctgggtgacagagcgatactccgctctgtctcacaaaaaaaaagctgcagattctgaccttgctcagccagcatggccaatagattctccccaacctgagtgttgtcctggggttggggttccaatcccctctgtccttgttgtccctcaaacagaacctggtgtcctagatcctcttcctcccctcttcacatggatttgggagggtgcaagtgctttgggtttttctggagcacaatcatatacaggttaaggtgaacactgtgaagtttcctcctcctttaggattttggatctgtctgttgtgcttggctctttcccagggggtcaggcatccccaccccgctaacaaagaccaggggagacaagtattccaaactcatttttcacctgagagatcctaagtctggacctttttgtagtagtaactggaattgaatatcagatagtcaagagtagcgggatcttattgagtatttttcttatttatttttgcttgcatttcttgcacatacattttgctttaaagaggcaaactccaactccaaacctgccagactctagcagctttagaagttttgttggaattaatttatgcttatgttggaagatgtaggattatctgagccaaagttagtagatgccaaaagctttggtctatttttgttaaggtgatctgaatcagttacaaatataaactggaaatgttcttatccaaagaaatcactatttgctcatttatgtcaatatttgaccaggcgtatttgcgagctactggttctccttttgtgaataacatgttttagttgaaatgcatgcctctgacagcaccttgggagtgtgctgtgatagtaacatgatttgcttcatcacaatttttattggaaaaaaatcattccggataactgcttgcaacaattgatctgaacatgtgtgctaatgtgaggtacaacaggtgtactcttttgctttcttaaatgcacatttaaaaataaagtagctagtgtaatgataagattaaatgaacgaagttgtactaagatctgacatctggtgagttaacgtctatcctatgctagaagaaactgataggaaattgtggcatgaatgacgtaacttttcagcatttaaattgctactttaaaatgggtacctctttgctttataacctatttttaaaaatggacttgccccactaacaaagctgattttctttttccgttttgccttttctacagcacaaaagaagagaaagattgcagtcgtgcaaccagagaaacagtacgtgcttttttcccctccagactacactgtataccgataaactgtagtgtctttatggaggatgggaagcatggctgtttttattggagttatctaacaaatagcaccctagtagaggtagcagtaaaacatagtgactgttatttgttatgtacctgttatgtgcaagacacagtgcctgctccccaaggcactcacaatccagattcccatggctcactttttattccacttcgacatacctggggagtgtcccagacctacacactgagagaaatcgctgtctgtgtctatagttctcagcgtctgcaggggccccacgtggcaggtgcagtttcgagtcgcagcccctcaccacactcagaatgctgctgcttactcacctctcctagagtagcccaggcttgggaggcagaaaacttcagtccaaccccagctctgctgagtgaacctgagcaagtggcattaattctctgcccctcagtgccctggcttgtaaaatacaatttgggggtacttacaaagattaaattagattccatttgaaaagaagtgtaggccttaagttgtaggctgaacaaatacagattatgccctgtcccccatttcagtcgtgattttctgtggaaacagggtgtcccccatttcaattgtgactttatgtggaaagagggtgttagcaaagcgtgtccaggcaggcagtgtgtttttgaatagttgtgactgctagtaacatttgtagatattgaaaaataatttaaaatacgccaaaatgtacattccaggccaagggattctgctttcttaagtaaataaaaatacactgatggaaagacaggtgaaaacagcatttttcacttgcggtagtcgagtttaaatttaaataagatgaaattgaactggaactgcacgatttgaatgagaagagcagctctgtaggtatttttttgtgggtttggttctaaatgcagtttatctggctcataaccagactccacgttatccgcctgatggggaagtagagagatttcataacacgcctgtgaccgaatccaaacttgaatccatcactccttaaatgcacagcccgtggattaacggttctcacctttctcatgcatcagtcacttagagagcttggagcacacagattgctgggccccatcctcaaaatttctgattcagaatgtccgagatggggcccaagaatctgcatttctaacaagttcacaggtagcgtcaatgctgtgggcctggggacccctcttggagaaccactccatagatggccttgctaagatctcttgtaagggttgactttgagcttaaggagcttttcaaccatgtggtttctatgccaccaacctagacacccctgtgaaacctagttcacctcttttcccctaaggctacattgtaaaacacatatttattcagcaacatttttactgaactataacagagctctgtcctggaataagcctatgttacattttaagatatgccagtttatagattttcttttaaggccttatttttagtgtggccatgactcccgcgggcccggaggtcagaaatcaaaggttagtggaaagtggttttcaattagacatcgaagtggaaaagtctgactttaatcaaatgtaagataatgtttcttcatgtttaaaatataattgaaggcagtattacaattccatagcaagagataaggccagaagcgacctgggagaaactcactgatcaggaccagctgctcaggggcaggtgtctcaggctttcttgggccatccaaagaattggacaacaacttttctgaaatgctgttttcatctggtcttactggcattgctcccatacacacattctattctatggtcctcttatctgagatttctggaagagcccttttaaattatggtaagactttggaatgtagtagttccttctaaagcttgtggtccctgatagttttattttctctgttgacagattgccgcccacagtgcctgttaagaaaatacctcatgacctttgtttattccctcacctggacaccacaggtaatcagtcccatttagggggtctctgtgccttcccaccgtgcagccgggagcagagacatgtataggtttctaggtcgatatgaatacatctcaacgttgagcctattctgtttttctccattgccactcaggaacggatacctactttttaaaaagaaaaatttctaagctaaattctctgtgcctcttcttttctgcttcttggccagtagctctagatagttctagtctatagaaaaagggtttatgtgtgacttgcaaattaggagccaaattagggctgcatatcatggggaaaaggaaagagttgaaaatatcatctcattaggcaatttcttttttgatattttatttccgttccacttgcatttttccacttgctgttagtatttaagtcgccccgagcttttgaattgttccttaaaaccctctaaagagctggttgtgaataatatatgttttttaatgtgtaaagtcttacatcttacaataatctttggaaatacatttgtgagctaccctctgaccatcaagtctggtaatagacatgtttgtacattatcatacttgattaaaaagtctattctctaagccaaaatgaaacctgctctgaattccaggattaaaaccaacatgtcatggaagaatcctactaggagattatcttggtagtaaagagcagttttataagtagctttaactaaaattttgtttttctgcaggcctggtaatcgaaaggcagagtaatcctaccaaaaaatttccatgtaaatgcagctgtggacttcattatttttcctgttttatataattcaaactttagaatggttttaaaagaaccatgacagctaccctttcatagtctataattgtaattttactccttttcttttatatccagaagaataacatttctgcttcctacctctgctggttcctagttgaagtctttatgagagcaagccttcctagactgttaaattaccatcccagattaatagcagtggttttgcagaaattccactgtgagtgttgcttagcttggagcttgggtagagtcagggtgggggcggtgactcccttagccaaaagtgaaacctcattctacatttatagacattaagaaacttttggcccagcatggtggctcatgcctgtaattccagcactttggaaggctgaagcaggcagattgcttgagctcaggagttcgaggccagcctggccaacatggtgagaccttgtctctactaaaaatacaaaaattagccgggcatggtggtgcatgcctgtgatcccacctacttaggaggctcaggcaggagaattgcttgaacccaggtggtggaggttgcagtgagctgagattgcaccactgcattccagcctgggcaacaaagtgagaccctgtctcaaaaacaaaacaaaacaaaaaactttcttctttttttgagacagagttttgctcttttcacccaggatggattgattacaggcgcatgctaccatgcccggctaatttttgtatttttagtagagatgaggtctcaccatgttggccaggctgatctggaactcctgacctcaggtgatccacccacctcggcctcccaaagtgctaggattataggcatgagccaccacctgtaagaaagaaactttagattgaggtcttatcatttaattattctgcttgcccatggcattggagacagcaagatcagcagctctcactattccctttctgagttgaaagaagaatacaggtaatgcacacttaagctgcagtgaggtctacttcaccgtcttcagactggcagagtggagaagtgcaacaggaaccattgttggggtagatgtaggactacaggagcccttccatggtgctaacaagagtgtcaattggggtagtcactgtggagaatggcgtggccatgtctagtaaaactgaagatacagatgcgcagacctgtggcctacctggcccactcttcttactcacctgcaagactctgttgcccacgtgtagaagattttcacaatcatattcatgaaagcactgttgacagtcctgaaaaagtagaaacaactaaatatccagcagtaagagactagacagctaaatgatgctacattaattcaatagagtcaaagaagtaaaaaaatgaatgaactttctagatccgcatttaccaacttggatatatctcagaaacttcttgttaagcaaacaaacaatatcttgcaggaaataatttatggaatatgtttaatatatcatatattgtttgtaggcacatgcatgcttctgtgtgtggtgaagttgacacacttgtgtggcatgatgaacaccagattcatacaatctggaaaaatgcatcagaatttccaaggtatcattaaggatataaaatgtcctgctattaggacacagcgcctctttctcaaaagaagaaaatcatctgtttttctctgctgctttgtcacgatttggaactagagtgtggcctcctaattacagttctaacgacactggctgtcacggttattgtgttcattttgggttccattgcttttattacgcctgactccccatcagccaagacctcggacagctctgtgtggtccttttccctgaccatgtggatgaagcaagggtctaggggtcccctagggtctggggctgtggtcctaagcatggactatgttgctgtcccctgcaggaaccgtcaacgggaaatactgctgtcctcagctcttcatcaaccacaggtgtttctcaggcccttacctgaacaaaggaaggattgcagagctacctcagtcggtgggaccgggcaaatgcgtgctggttcttaaagaggtaaagcccgtgcacaatcaccttggcttattttaacaggattttttaaaaagctgtgggctcagtttctgaaggagggaataggcattggaagcagttcagctggcatttaccgagacctccgttctctccatcctgtgggctgaagccagagatacacaaatggaaaaatgatgctctgacccatgaaaggctccccatctagagggagggacacacatctgccttccctcgaattagggggaaaagttgcactagatttgaatgaagtgctttgggaagacagagggaagattgtgtgtggagtgagggcctaggactggagttgaggtttccaaagaggtaaaccagcctggaatggcacagaggacttcatgaggcagcagagggtgttaatcaccgagaatggcgctccttggccgggtcatggtgctgtgccatctttttgtttcatccatctcttccgagcacctggtacctgcacacgggaggtaatggtaagtatttcaatggtctccaggtactttgacgaggtttgtgtcatgggtcacatccaggcccatcacttggaggctgtggctccccatttcttctgctgccttcgggcgacgacctgcagagacaggtgaatcctgaggatgttgatgaaggcttcttctccattgcatttttctagcatagcctcagacagtgcttggagacagattggaaatttggaatagtttccaaactcttcccggaactctatctctgctcttttcttacacgtatccgtactttctctgaagaaagaggataccaaatggatattctctattgccaccgtaccatgatgaatgtttcttaaaattctgcaggcacagcaatccattgatccattgaacaaatgtttgtcaggtaactttgaggagccaggcaccatcggaagcattggattaaaaaagaaataggctctgccttctgcctgttggggtttcctgctcttgttagggagatgatgtaatcctcagcttgatgtacagttgggcgtccgagagagaggcaggaacacagtgtcctgggagtagagtgcaggacaaatatatggcaagtgacatttcatctggcttaggcagagtgtgtaggatcctgattgcacagcgtgggcatggccacacaggtgggcattcaaggtgtgtttcagaaaggaaagtcaggtatggctggagcttaggaacttaggctggagataaaccgtggcataaaagggtgcattagattttgagaagaaaaacaggaagctggcctgccttgatgcttcagtgtgaggttggatggagcaaattggatggggcctgcttgtgaaaggccttctctgatattttaagtgatttggacttgaatctatggatagggcaccctcagagggatgcgagactcaagctttccctccacacgagagcctcggtgtgatttcaaatatcatttcacttgaggagaaagaggccattgaagggaagtcagagggcattttctcttcctggtcatcagtggtattcgtagttaaagacctttttatttaaaaaaacatctgcttgagagaggaagtagaggttacagtttagaagaaacctgtcagaaatcgataaggctattgttgtggtcatttatttgggagcatgtagaatgttaagcaggtggtccctggcccacatgagcgtccagtcgatgggaaagatgagtatgtaaatagaaggtagccacgtggtcccaggttccaggacaggacctggcatgcacactgtgagatcacaccggaggcatctgcaatctgtggggactgcggaacaggtggcctgcccctggtagggagaggagcaggaacaaggctggggcatctggggtgcgggtgatgaaggagggaagaggagaggatcctcacagcacctgaaatgtgcagactgcaagggatggacccagaaagggcccttgttcgtgtttagagtctgttgcaggcctggccattgtaccagggccttcatacacatcttcatttagcagcagaatggagctgccttccttgtaaatagctcatttctgcatttggtcttgaaatcgaacagtacgcatctcactaagcctaagtggcaagtagattccatatatgagaaattcacagctaaagagaaagggtgattgagttgggagggccacaccctgggaagggctccgcagtgtggttaagcagcaggaccgctagttaatgctaagtgaataaattggcacagattggagatccctgcagatactaaactcaatccaaacagaaatcaagccaggattacacataagaatttctgccaccatcggaaataggaccctagagtgagaattgactttcttccgtctgccacagctgtcagtctgtgaatggatttccactagggcaatgttgtctgcctgtatttctgcctgtttttgttgtgagtgataggatgaggacacaacaactgacaaaaatacggagagctgatgggcttcttcgaagctgcctgcaagcctgtttcacgtgacgtgttccgttgttgaaatgacaccttcccttatctgccagctctgttaacacacaagatgaccttggcttcagcctgtcttgaggggctggctgttttactttactaaatgatttgtttaagtcagaagtggttatccctgatcaattctccgataagtgccagcggccaaatttaaagccgagtccagagcagttttctaatgacaaaactagttttttgctgatgtttgaaaaatgcatgtggcaggaagaaagaaaaacaaaacaaaacaaaaaagtaggtgagtgcttcagttctgtgagtgcaagaaaaatgtaagtgccaccaagctaatatttacgctaatgctcctctttcagtaccagagcctctgtagcttcaaatttcattttagttaaagagaacgaggtaatggaagtaaagacagagtgcattgcttttcctggccatcggtgttattaggaacttgaacactttatgtgtaggagatgtgcagtgagagcggttcaccctgatctgttctgccagaaatagacgtctcggggtgtggatgcagacatggtctttggcaaggctcagtgcaggctgcagagtccagttctgggttctgtctgagtgggccgctttataagagaggacgaagtttctggcaaaagtggtctttaatgcatggctctactcacttgatgggtgttagagttgagtggggtttggcaggaccacgagcgtgtctggcctcaattcgagggggtgcagcgaggggaggtaggggacctgggagaagctggaaccagagtcactcaatggtccactgaggtccagacgtaccccataagcaaactcagaacgaagcaggccttggcgtggaggcacaggcccagctggtgaccgcccctcacatgctgggccttttacaggatgcccatgcccagttgcatggagggtggagttgttaggcacaggcagtggtgatgctgtttatcctaagtcacgtgtccatgctcagtagggtcattgtccattgggagcatctttttctatcccaaatccttctaccccaacctctcccggagtaccagggtccccaaaagagagataaaccatgatctatgtcatatcaggagattgctcgcctcctatgaccaaaagggtcttgtcggctgttgcgttcctttgcattgcacgaggtgttcaggaaatttttgccttgtaacttacataccatctcatgaatcaccaggcctgtagtcctcactttatagacagtgtatcaggctagtgtctgtgtgtgaaagagaaagcaaaccagtgagccagcctgggcacaagaggccaacggggagcggaacatctaatctatttactcctgtccgtgggtcctggagtgactgtttcagctgcagacacagacccatgatgaaggtgagagcagaccagccaagcgctcctggcagaaacgactctgaaaacacgcacctgggtagggcgatggagcctctgccttcacagggactccacacatcatggtggggggacattgtccttggagaaaatcccagggtggctctcagagacttggggagccttgtggtttttcttagaatttatttggcttaaaatatcagtatgtaaatgtcagtgacagtatctaacttctgtttttcagaaaaaaagagaaacatgcctttcatgtgggccatctgtgggcacccctttgtgggttttccgcatgagcttcaggggtgctgagcaggcaggggctctccacttgtgtttgctcggcagcagacctggcctgtcctgtgtgctgctttttggcagtccaggttcaggagcttaagagaggaacgtttatagaaaggaaatcgatgagctgtaaccttctatagaaaggtagaaatagaacgcctgattttctgctctcttttttcttcttttggtgcttaagagttcagagaaagccccaggaagcctggcacccaggatgctttgcaatgaggcgcttctcagggcttgtttttttgctccagtgtaactctccaccccgtttgctgagatgctggtgagaccagggcactcagctgaggtccaaagactgggtgtgaaggcgtagaccagcagaatcaaagaagtagtgcggcacccctgaaccagaatgcggtgtgccccggacccccggccctgagtcagagacgccccactgcaaatagtgatgtgacctccgacccccaaagggctcaggtgactctggctcctggtcacctgcagtttgggatctttccagtgggacctggcggtttgggatttggcctcagctgttatttacggtttcgatttctgcccctgtggctgatgcattaagcgatttccctccgtgtttttgtttggggtgtctggttctcacatctggggagtctgtcatgtgctgtttgaatttccccttcattgtggagctctgagcatttgtcctgggctatcactcacaacaacatgtacctaaaaactagaaagctttctggtcggaatcctgaaagtcggctgccccaagcagccttcagtgttcatagacttggtggtaggagaagagctttcattcttcgaagcagtcgtaagtttatcggtaacacccaggggaggaggtgttgagggagtaggaatgacgatctcgtattgaggacttttccatgtgatattggacagagggaatgtcttacccagctgacctcagcgaagtcagtcctcggaatcaaagacagatgcagacaggcctcttgaagatactgtgctgtgtttttgttgctgctgttttcaatttatgctgaacattagttaacccactaagaataatgtgccaggcttacgggtgggtgtgaacttgaacacactcacatggtctggggtgctgagggaaggttggcaaaggaaaagtgcacatttttttttttgcatgtcaggcttttctttattattttctcatagagaagacaagataaatttgatgaactttcttatcatagcataggataagattttgtagcaatgaaaagcaatagcaaatgataactcctgagcctccattcatgtagattatatggcatcaaatacttggagtgaatttattgttaatttttagatgaacagaataatttaatttcagagcccatattgaaattattgaactaattcaaaaaatatctatagagcacctactcttgccagttatggttgtatctgccatggatacagcagcaaacagaatgaagtccctgatttcctgctgcttatgtcttagtgggggtggatggtgaacaaataagccaattacggaataatcctatactaataataagacaagttatccatgagaggccagagaatgaagggaggaatgtgctgtgtacagaggatactcgcagagacctttctgatacggactttggagtaaagacccggatggggagggatggtctggaagggtttccccaggaagaacaatcctaagagaagaacagagcagaggaaaggcctgatctgacctgttgaaaggatcgccctggcggttgttgggaggtgaggctctcagagcgtgaggtggaagacagggaagcccctgccggcagggtgagaatagacccagagctgcccagcgtttcggccatgtgctctcaccaggcatctggataagacagtttcagggacattgtggacacagaaaagccccattggattgggttccagagaggactgaagaagaggaaaaggcgctgttgagtgtagactcttcttaaggattttactgtaaaagagctgagaaatgaggtgggggaatgtgttagttcgttttcacattggtgatcaagacatacctgagactgggcaatttataaaggaaaagaggtttaagggactcacagatccacatggctggggaggcctcacaatcatggcagacggcaaaaggcacgtcttacatggcagcagacgagagaatgggagccaagcaaaaaggggaactccttataaaaccatcagatctcatgagacttattcactaccacgagaacattatgggggaaaccacccctacaattcaattacctcccacaaggttcctcccacaacacatgggaattatgggagctacaattcaaggtgagatttgggtggggtcacagccaaaccatatcagtggaggaagatgagacacctaaggtcctattagtttgggggcaggggcaggctccctgctaccctctctgatcaagcacataatgaactgaactccagtgttttgcaaagcacaataattcagtctaactgtggctagtcatagcagctgtccacttagttattttcattaggtaactataatacatgacattgtcatgtgcacagaaattattcagctcacaattccaaagttttatagagagcttgttgaatttggagacggatgatgtggcatcaagaaaagccaagggaaaaacattcaatatccgatgcttttcataatttaattgctgcctgctcccaggctgaattgaactccagaaggcattttcttttcgcagtcacaaaatgcatctcgatatgcagcaaataacatgcagctctggggttttctcagcgaaacccaatgaaaagaatctgttgaaattttattgtctgttgataaacactgtgtgcgttattgcagtcagtactaattagatttatttttaaactgagtttctgtaaattgtactgacagtaaacaataaaatcagatgattattctaatacagaaaacacaaacgcaacaaaactgccggtaccgccttgtcatggctttttagcaccttggcaagccacattctcttggtgggtggctttgaggcccttggaacatagcaagatgttacccaggcagagaaaaggccgtcgccgggctgaccgcgtagtgtaaagtattttaagagtgaatccttagttacaacttgagaaagctttgttgttttcaaataaatcagggtgcaaaccaagctggttacgttccagaacacaacagacccgtgaaaattgtgacaagcaaattccatccacattctcccatctccttccatttattttgtaatagtctccattaaaagatagtgcgtgtttaggcactagtgccagactcccatctcactcaggtgtatctcttgctctcccaacggtattttgctctgaaatccaaaatgtgagctccatgcctggcgtgctccttccaacttccgcacccggacggcctgcaggaggcatgggcactgcgtgctcccccgtcttgttcctgctactgtcactcagtggagcttcacagaggatcatttcatgaaactccacaccataggcctctgctttgcactctcacgttctgtaaggtctttatccaaacagcagcagcccaggaatgtgccagaactcatcaatgttaatcattaatgatgatttgctttttgaaaggtgagcaccttaggggtctgaggtccttgtccctttcattagagaaactcattgaggttaacaggaacatcgtatctccccagggtcagcagctggaactcttagaaatgcctgctctttctgagccccatggtagacacatgcttgttttcttggacttgggagtgaggggtggatgggggaaatatgatactggatggcgctggatattccagactctcttttaaaatattcacatttcagagggttgccctagtattaaatgtccatgaattgagcctgcaagaggagagtttcacacaatttgttaccctccttgcaagcatgtgaagcctctccagaagtgttggcatgagtagattgtctccgtttcattagttccttatgaaatctgtaaaaatagaatgaaattctcagtagcctatccaactgaagagtaatcctgttgaagtacaataaattgctctttggtgaaaatggttcagcttttctgcaactagaagagttaatgggagtctgccaccccctctagagagtggttcacacttttctagccagagagattgtattttaccacgctttttgtccatggatggtgaaacaactcagtgttagcctggcaagtgttctatcagacttaatcacgtttcttcacttcatgtgggtgtagtggcgagctgttcctaaatgtcagtggtgtggttttcaaagcatccttgtgttagtaggaatgaatgcaattgcagctcagtctgcttatttttttccccaaaaggttcttagcatgataatcaacgcagcctacaagcctggaagggtattaagagaattacagctggtagaagatccccactggaatttccaggaagagacgctgaaggccaagtaagtgttttcaattctggaaagcaagggtttttgtaatacttccccatgctactttgaaccttgccacttctctttgtgacacagccctgagaaatggaacaaactgaaggacgttcgttctgcagttctatgggcgacacgtaaatttcttggcatttttgccatacagcgttgccttaagccttaggattcctaaggtgaagtagagatttccttaactaatattttattatgctaaacattcagcatcataaaaacttggtatgtttcaggaccaataggttatttgagcaaaagggggaaaattgtaaagaggatatccctcatcattattatactatgttcataaacagctcttcatttttgatattatatagactatgctaaatgcaaatgctctcttttctggcagttgacagttctcaaagataaaaggaacccgtgcatgtttggtctgggttaagtaaatggcagcaaaatctgggttggcgtggagtcaagtaactttcttttatttggaaataggctaattggaaaggtgacatttttgctttctttaggtttcttgacctctgaaattgagagcaggagccgtatcaatgtacttgaacttggttgtttaggcacatagaaaaagatccgtttctaagataattttatgttgaataattgtttagagtgcttgagaggacttttaatattcatctatgggtttcaaatagaataggttttactagttgacttcttaatggtcattgagatgtaacatttgagaaatgatgtttttttaaaagagtaaaacagttttcagtggctagaggatatctaagcctcctttagagaaggcacctgccctattcatagtgaaaattgagaaatatgaaataatttgtatgatcggtaatattttcctctatagttaacttatactagtactgtgactgaagatgtttagagattgtgccacactcaacattcattgccagcaatccacttagcattcctggtgtcatttttgaacagctctggggttttagattcagtaaaacttatttatggtctaatcataatctgccaaatcaccaaagtggaagagaatatatgtaaataagaagagggtttatttgcagaaaatggcaggccaattaacgatgctgctacatttcatcatttccttctttctcaagaaatatttaagtgagcttcacctatagctcagagaaaaacatgtttttctaatatttcatatttttctgctttaaagagatcattagcagtagtggcacattttcttataagtttgtagtagtagtgggggcagaaaacataagcaagtgtttataatggagaaatccttcttattttaaaacttttctgcaaaattcaatacagtccacgtacacctaatggacacagatataataaaagtacaaaaatcttagctcccattaaaaccttccctgcctctaaataagccagaaactcgctcccgctccacagtgagaggaagttcattttgcaagtgtttgcactagttttcatgttaccaagtcgatcagagctttttattaaatccagcctgatacaatcaaaacagacatggtgaaacccagctctactgaattgtaaaggcagcatattacctattatatcaaatatgacaaaaagttccatggcaaactcttacacagcaacttctaatgagaaaatgtctgtctgaactgggtttcaactgtgcgagatcatagcagcgtctcaaagcagctgctaatgatgacagctttacagtcagcgggagctctcctgctctgatactgtgtgttgagtcacctcttcccttctgatgtgaaatgacaactttttagatcttgacaactttgctattttctttggtgcaaatgggaggagagagagctggcatcttcccatttagctgaaaggaaggcatgttttctgtcatgaataaattaacgtacaagaggagagactcacattcaagacatttggtccaggccaggcgtggtggctcatgactgtaatccctgcactttgggaagctgaagcagcaaatcgcttgagtccaggaattcaagaccagcctggacaacatagtaagaccctgtctctacaacaaataaaatatttatatatatatatatatgtgtgtgtgtgtgtgtgtgtgtgtgtgtgtatgtgtatatatagtatgtatgtatgtgtatatgtatgtatatatatgtcatatatacatatgacattcagtcctcttggttgattatgggagctgttgtacacaattataaagactgttttcaggaagagaggatgtgagattatccctagggcagtgtgattgctctcatttggcatctaggatttctggttgttttttccacctcctaagagtaaagacccatttacttgagaggatgaaggtgtctttgtagaggttttgacttgtaaatataacgaaaacttacactgttacctacaattgtctctgggtgatttttcccctatttatccaacaaccgtaccttttatagaaagaaattattgcaatatttgaacttgtgaggagtctatcattattaccttcaacatgtattgaaaagcaaaaatttgctagcttttatgccagggaaaaaaaatggcttctcatgtagttcatttctgttctggaagagaaaatttctttcttgccaatgaatttaaatatgctcaatttacctgcattgttttgaattacaggaggaggaattaggctatatcttagaggggtaaggaaaaaaaaagccctccacctctctgcatctagagacatttaaatatgtttttcagcatgttacagaatcttcttgagggaaaataaaaagactgtcttaactcttctttgaatggcttttgtgatcatctttataaaagccaggcagaagcttaataattcttctagtcctgtgttatagttattcagaatatttaaagaggaaatatcctggtaggatttcacgtgagttagagctcactgtcacttatcagagggaaggagataaagtcagatcttcactgttaggtgcgtcatgctcagctctgtggaaatgttgtggtttcttttttttcataagcagtggttaattttgtgtgtgcttttacttatttgactttaatttttgtccttttacgcaagcatttgtcttatgaactgtcgcaggtaacatttggctataaagtgatttatgtaaaaaaaggattccctaactgagagacttcaccggaaaaggttttgtttgttcatttgttaattttgtttaccttgcgcaagtgtatgtagtttgctgtcctgaaaacgcacgaggtgaacttcgcgttaagcaaagccatgaaccagtctatttgaagggaagactgcatttctgtgtatgtgtgtacctaaattcactggatcacggtgtggcgtgtctgattcaaacaggccagcttaagacattctggaggagcagtagtctccttgggataaacatacatgcccatgtgttgcagagttcccattacttaaaggcaagaaggaagaaagaaatttctgaggagtttgggtgtcctaaggctgaaaaccagtgacccattctcccgaccctgaagtccagtgaccaagaatgagaccaatgaagtgaaagctttgttctgaaggaagcgagaaccgtacctcactattgctgatgagaacagaggctttcccacagcttgtaaagcttccctatttctgcagggttctcagagtcaccatttccttcctcttttaattcttcctccagcatttgagggtgtgagttcagcttgaagaaccagaacctcgtcctccgctcccacacccctatccctgcctgacgagatttgttaaaaggtctcataagggtgattctgagggtgaatgatggaacttagaccatagtgacattctgcttgggccgtgccggtggttataaacggattgttacaccagtgttggctttttcactctgtttttgtttttgactcaaaatccatttagattcttctcaacttttaactaccgtattagtccattttcatgccgctgataaagacatacctgcaactgggtaatttataaggaaaaaaaggttaaatggactcacagttccacgtggctggggaggcctcataatcacggcggaaggtgaaaggcacatctcacatggtggcagacaagagaagagaatgagaatcaagcaaaaggggtttccccttatgaaaccatcagatcttgtgagacttattcactaccacaggaaaagtatgggggaaactgccccatgattcagttacctcccactgggtccctcccacaacacttgagaattatgggagctacaattcaagatgagatttgggtggggacacagccaaaacataccagctattgaaggagaggagatgatttttttggcattttatcatcccatattcctctctctgtctccaccctgctctatgcacttggacgtggaaagaaatccctactttggctaatgggaaggaagtggaaggccacacatatattgatatcagtgaggaaaaactttgcctccactcctttaggttcagagactgggagcctgaaggttaaactgaccaaagacaggtgagtgagagaagaaacagcccacttacatgtgtaacgctcataccgagggagtgctcagtgatgaataactcagagggtgggtcagtcgtttggggattctgtatccaactcagtacgggaaagggagctgggagcaaaggctttcgtcagaagaacaaatagattgctttgggaaagacaaattggatttgaggaaagcaagtgagaagtaagaaagtttgtgctaatgtttgtttatgcaggtctgagtggtctttctctcttcttcatggccaggctgggaaacgtccccagagaggagatttatggcagctttactcttacgtctctctcctgggaggagaagctgcccccaaagagggaatttatggcagtctccatttctctaaagtttctattttacagcagataatgggagctccaacaagacttcttgctgtatctgtcgaatctcaactatcttgagcttaaaataatcttctgtggactctggggttctcagtgtcctgcgctgacaaccagcaagagcatctcctgtgttttccactgttgatctgtgacttcctttactgtctcaaagtgtgcttccgagagcactgccagccccagcccctcctgatgtgctcagcttgtaggatgagattgcgttcttccctccagatttctctgcaacctgagtgatgcagaggtgctgggatggcaaggtctatctgaggactgagatgaaagctctccttcctggacctctcccttacaactttctcctccgtcaccttttttgtctttgctattccttagttccaactcagtaatcttttgcttgttgcttctattttccttctttctgagattatttatattgccagagagttttctattgtgtgcgagctcagctgtctcttaatattttcctcttactttgtcttcttgggacttgaaatattgcttcaaaaacttagtgtttatgagagccttgccgggccgtgtattaaataacatcggcgtctcaccctttggtctcacagtgtcagtagaaagtgaaaagcattatctcatgctttttggtggttctttttttttaacttttttttttattatactttaagttctagggtacatgtgcacaatgtgcaggttagttacatatgtatacatgtgccatgttggtgtgctgcacccattaactcatcatttaacattaggtatatctcctaatgctatccctcccccctcccccaccccacaacaggccccagtgtgtgatgttcccctacctgtgtccatgtgttctcattgttcaattcccacctatgagtgagaacatgaggtgtttggttttttgtccttgccatagtttgctgagaatgatggtttccagcttcatccatgtccctaccaaggacatgaactcatcattttttatggctgcatagtagtccatggtgtatatgtgccacattttcttaatccagtctatcattgttggacatttgggttgttcttttcacacatcctccctacaaagttatgtcattggtatgctgtttgtaagtctttcttggaaggtaaaaatacaaaacacactcttcttttcacttttggtaaaataaagagtagaatgaggctgagtgcgttggcctgtgcctgtaataccaacactctgggaggctgaggcgggaggatcacctgaggtcagaagtttgagaccagcctggccaacatggtgaaacaccatctctactaaaaatacaaaaattagccgggcatggtagtgggtgcctgtagtcccagctactctggaggctgaggcaggagaatcgcttgaacctgggagatggaggttgcagtgagccaagatggtgccagtgcactccagcctgggtgagagcctgtctcaaaaaaaaaggaaagaaagaacaggtcatccccctacccagccatccccaggtctgtcacgtggagctcaaacccctgtccactgtgcctgggaagatcgtgtaaggatcaagtgatcaaatgctgtaagatccttgagaatatgtcagtagcttcattacataaatgcagatttactgttaattcccagccagttggtaaactcttagagctgtcttttgcctctcctttttttttaatagggctgtatcttcgtatgttcagcatgcctttgaaagagttgttccaacagttaccctaatttgtaggccaactccaaaacaagcctgtttattggttcaggttggagttggatttcacaatcaatttatccttaatgtattgatagcatctggatgtgtccatgtgtactcaaccaatagtgctcagaaatgctcatgtgatggaaagtctgctgtagagtcagcttggtatagtttgagtcattatatgactacatgcctttatattatttctaagtgcttttgaaacaatctcatacttacagaaatattggaggtacagaataaagatactattcattctcctgattgatttgggataagttgaaggcctgatgccccgtcacccccaaatacatgttgaatatcctttattccaattgcttgggaccagaagtgttttggatttcatcttttttcagcttttggaatacttgcagtatacttatattatgttgacactcaaaaatttcagaatttggagtattttgaatttcagattttctgattagggatgtacctgtacttttttttttttttttttgaaatggagtctcactttgtcacccaggctggaatgcagtggcacaatctcggctaactgcaacccccgcctcctgggttccagcgattctcctgcctcagcctcctgagtagctgagactacaggcgtgcaccaccatgcccagctgttttttgtatttttaggagagatggggtttcaccatgttggccaggatggtcccaatctcttgacctcgtgatctgcctgtaagcaggcttttctaacgggagtggctcaggcctgctgtgttcacccttttctgtgcgcttgtggtggaacgtaggctccaattccagtccagcatgccagggttcatcctagccttttccttccctatacttgcaactccggctgtgacagtggaagcctggcctgtgctctccacctttggagtatgtatttatttcgtcaggccccagcgtctctccagtatcctcaccctcccaacagctgtccccacatgcgacggcctcccccctgcgtccctcccgcacttccatccttttccctggtgggttcctcccagatgggtttcatcaaggagggcccttgggaccaatgcctttggaagggaggggaaggcagtgggattgagaagacagagatcatcccacagtgaggccaggcaggcacccgcagcagctctggggttaaaggctcttcatggctgtccggagttgggccccagtgacctttttacctcctccacagtcagtccctggatggggcccttctgggaagggcagggccaaggcagctttttgcaaaaccctaaagggggctgggcacagtgactcacgcctgtaatcccagcactttgggaggccaaggcgggcagatcacttgaggtcaggagttcaagaccagcctggccaacatagcaaaaccccatctctactaaaaatacaaaaaaaaaaaaaaaattaccactataggcgtggtggtgggcacctgtattcccagtgactcaggaggctgaggcatgagaatcgctagaacccaggatgcagaggttgcagtgagctgagctcttgcaccattgcactctggcctggatgactaagtgagaccctgtctcaaaaaaagcaaaaaaaagcaaacctaaataaaagggccacaactgaaggctttctcccagcaggtggggcaacaagccccccagtgaaggggtccaggcagcacgccatccgccagcttccccagcccgtgccctatccttactcagtcccctctacccctcactgccatggcttctaaacagaattgttcaggaagggcagggaagagaaaaggagcccgctgtttttaaatgatgctataacttaaatcttcatacctttagatgggcttttccctattgtgaaagtttttactgaaacacttgtttccatgaaatcatcccaaactaggaagagaaaattaagccagcctggttctgtttcccccagataaccgctcccttcatccgtcgctccgatgtggcagcgcgtgtgtgtgcttcgtcacctggaggtttgatgagcagtctcatctttgagccttgttctgcagtttgtcctctgacctggcttgcacatttctcctgcgttcttatgtctcattattttatttttctagggactctaagaatctcgatagtgagctctttccaacaaagttgtggggccaccaaactcgtagtggataaaactgcaagggaaaatgtagccgtgaagcacttttattctacatttcccatttttactctccatttcccacaacacgaggaacatacggtgttcccagttgtgctgtttcttttgtttttttttttttttttttttttttcgaaaatgcaacaaaagcaataagcaagaaccgccccaacgtgggtcctggagtccctcttcaaaggcacggagagggaagtctctacacatagggtcaatggagggcctagaaaaaccaacagccattcaaggctgtaggatttaaagcatgatcttatctacagaagattactttctagttctcactacatggaaagtcaagctcgacccatcagagaaactgaagaaaaacaaacacccaggggctgggatatgaaagaccctgaataaatatgaagtaaatttagtagagtatgcagatataaagtacaagttggaatttaatccttaattttttttgccgttgatactttaaaaaaaaaagatttattagtggaaaagtatttttccagtctttagaaagacattcctaaaaagctggaatttcatatttcagtagtttggtgatatgtgaacgaaataaaaacctatgatctgttgccagttgagaagctgaccattactttgtccccatgatagggttaaaaatctgtcaaaaggtgattgaaacctacaagtgcttgtgttttcagccaggcattatgtatatcatattcccataaatatttggataagggctgtagtgcctaattttaaaacaagaacccatcgaatctgctttttgtagctctggttgccagttttacactggtgaattcattacctgcggtttttcttggggcaggagaaagtttttttcttaaaagtgatgagcaacaagtgacaatatctaggttccagaagcatgtctcactctaaattctttgttgtgtgggtgggtgtggggagggatgcgaggagcttaatttttattcttcactaaatagttacgtttaaggaaagcagtattgcacttgatatttatatatgatggcaagacagtgccatctcttcaagcaatgtttgttgacgtttttggattcccatatataaaatcagttccttgtggataactataaaaggcgtttggatttccagaactctcgttttcctagtgcgttgaaaaggttttggggaaaacttccatacccttcatctagattggtgtttcctctaagatcagagacaagtgcttaaggaggacctcagagaaaccttagaagatgtgaaccgagaaggaaaggtacaagcaggcagcagccatggtcaggagaagctgctgtgtgggtggtggggaggtgcaggcaggcagtccgggggtccccattcttgtcacccccccaccaccggaggaatgagccttgtctcagtcagcccaggctgtgcagcaaagagccacaggccacatggcttttgcaacgatgtttattctctcagtgctctggaggcctaaagtccaagatgaaggtgccagggttggtttctccttaagcttctctttttggcttgtggatggccaccttctccctctgccctcacatggtctagtctctgtgcatgtacacccctggtggcttttcaacttcttcttcttcttcttctttttttttttaagagacagagccccactgtgtcgcccaggctggagtacagtggtacaatcatagcttattgcagccttgaccgcctgtgctcaaggaatcctcctgcctcagccttctcagcctccccagtagtgccccaccgtgcccatagtttttaaattttttgtagagatgggggtctcgctatgctgctcagtctggtcttaaacctctgggctctagcagtcctcctgcctcggcctcccaaagagctgagatgacaaggatgaacctccacactcaaacttttcatcttcttacaaggccgccactcctatgggattaggtccccacccttataacctcgtttaatttaattacctcattgaaagccccatcttcaattacagtcctatcgggggttatggcttcaacctatgaatttaggagggacatggttcaatccatataataagaatgaaggtctcctatgtgaggcccctcagttagatttaccgctttttgcggggggcggggggagatttaactggagaaatgccttttattttttcctaatacacaaatagactgtagctttccaaagacctcagtctaataagaaatagagatgcatatgaagtactgttgattccagcgtgcattctccttgcagtatgatttcatccactatctatcactcaatcaagatttgagtctgtggggaattgcggtgaaggtgtgcatgttcagaaaggattcgatttactgcttcggagaaagcaaccgaagccatggagggggttgctggggggactggagagcaggtggaagcaagttttagttcctggagcaatctttcaccatcccaacctagaggagaggagtggccagttaccctcatgggcagagtatggcaagcggcattaccatttcacgttgctccctttacacttgagagatacagcagccttttcctttaactgccactcatccaccggagaccccttacgattctgtttacactgaagccacttgctgccagtgtctgcaaggctgggggtcttcactcggtttccaggtcccaatcatacagtcactctgcatttttaatggtagcttttttctttctttttttccccttataaaatccattgtgtttctgtccatttaaatgtgaccttgcttacctatcaccattctgcacagatgccatttatgaataatggaaatcgtccccatttcaacaatatgatacacagtcttgacaaagatatcctttcagtgttctgaatttgcatggttttcaaggcagaatcctgatcccatatgcactcacatttttcaaaaatgaaatatgatagcaacaggaaaatacccattcgatttcactaacctcatttcgagagccatgcccatcaggtatgtatcccgcaccgctcatctttggtatgaagttgtatatagcaaaatgaaggtgtgctacatgtgggggtgtttatggaagtggattctggtttagcactgttacgacacatttgttgcacactagtgagcacttcttataaatatctctgtgagaaataacagaagcaacatgggaaactgcacgcgatatgctttgtcattggaaaatgaagttgctgccttcggaatgtgtggtacagaataggcctgaatcataatctggtcttgccctcgcttttcttccccacctattttctagatacagaggcaaaacatacagggctgtggtcaaaatcgtacggacatctgaccaagtcgcaaatttctgccgccgagtctgtgccaagctagagtgctgtccaaatttgtttagtcctgtgctgatatctgaaaactgcccagagaactgctccattcataccaaaaccaaatacagtaagtacaaataatgaaaaaagaaatgcatgagcccagagacctaaactgcactctaaggtatttggtttttgtttcatttgcttttttctttttgaaccttttgactagtcttccataggaattgctatggaaggatttttaaggatttgctgtagcagatacatgtgtttttagcctgacatacggaggggatgggatgatttaaaacaggatgaattttcattggtaggccttggaaaagaagaagaggaactgtgtgtactgtcatgagtttcagtggattgattgattctacagctcaatggatggcaggagagcacagtaaaattgatcacagtaacagtaacccagatgactctttcagtccttactctgggatagtgtaatgatgctttcattgcccttcttgatacgggggccacatccttgtcataatcggcttctcatgtttagacgccttcctcagcaccctcactgaagagagccatggaggactcagaagccaccatcactttcttttctgccagttggctttgcctctctcccaggacacagggtgcaggactcagagctgtccccactctcctaccttcagctcttgcctcttccatccccagtcccattcgaggatgtctggccttgggcaaccgcttcccctgagccctgcccttctttctttctgatgaccttctccatccatagtagccactcccagacacctccacctcctgtgcctgagtcctgttctctccctctgacccacagttctgagtttcctgcgtctcccctcagttctctctaatgcaagggggagtgacctggaagttagctctgccagccacgttccagccagctgggatgtgacaagggcttggccatgtggccagtgctctgtgagccacagtcacttgtgacgtttgtcaacatgggtgctggaaccaggaatctgaatgtactggaaacgctgtggagagtgtgactttctttgtattttattatctctcagtgtgtttctacacacacacaacacacacacacacacagagtccccttgccactctgccttctgatggaggccagctgtgccctcactgatcacacagacctcccctcattctgtgcacagggcctctcaggtagggcccgcaggtgtgttggcccagcaggtcacctggttccggaagagcttgtttctccatcactgcacctttttccaggggagggcttcactgggaaacagcagctcctgagtaagaaaggcctaaccgagggctcgcctttgccgtgtacggtgaatgcttacctgccaggtgggcttctgtgttcttccaggacactgggaatggcagggaaggagcagggtcccacacctcccattcagcattgccgaaatgaactcagagatgtctccggatctcatataataaaactcttaagtcccaagatcctttgggttaatttataatgaatgttactaaaggctgaacagaggctccagtgggaggaggacagaatgatattttgggggagtcaaacactggaaaagcaggggtcacccagtctcgttctaaggctccaaacacatactggcctttggctgcattccctaaaaccagttctcatccccagccactggcttctaagaagccagcctgccctggccctgtcatgcacgcttggggtttgggaggggacagaggcttgctcatttgccccgtacctggagatggccacagagcaatgctcgcccacggcagtttattcctgctcactgagtaacacggtccttatagaactggacacgggacattgttccaagctctcctgccagctgctccttttgagagattgatgagaacaggccggggctcccggagcaggtgtgcctcctgggagttacagggctgctgctgtgcggcttcccgacagtttttccaaatgccatgctgtgatcaaacgcaggggaggaggtgggacatagagggtcttaggcctgaaggaaacctatgcttgttagtcctgatggtctcattttgtaagtaaggaaattggggtgcagaaaggataggtgacttacctgtaggacaaagcccacgactcagtactgtgagaatgcactaaaatcatgctccctgcaacggggctgctgcaaaccaggggtggtgcatttgccattttgctttggcccaccccattcgtagataaaggttccttggctgcattcagttattttgtggctcatgggcatcacatagtgggacggttgaaccttttattaatgagtaggcgtctgggtcgtaattgaatgctggatccttagtggtggttttcattagctgatgatacattttgtttataaaaaacattaatcactactaaagttcaataaataatttttgaattaagatgtacacctgtgtctctgctgtagaattcagaagcaatgtgagtcccagcaaatgagaaggaaataaagtatacaatgatgtaatagagaaggaactctgagaagaggaaaagtgcttggtgaatttggcccacgtgttcaggatcatagcttatcttggtcggaccaagagctgggggagtccctcatgccaggaccacgccagcagatgttcacccagtgcttgctgactgaccagtcgctcaagattcagacttgggagcaggtgtcagagcactccggtggatgtcattgccaccactgtatgcagtgtctggggtccagacagggataaactcccgtgggaactgtggacacctttgtctctttcaccttctgcagaagtcagctctggcttacaacaacataccacagaccctgagctttcactgcgcacacttacctcccacagtcctggaagctggaagtccaagatcagggtgtcagcagctttggtttctgatgagatccttcctgggcctcaggcagccacctgcaccctgtgtcctcatggggcctctcctttgggtcttgggtccttggtgtctctcctggacactcttaggacctcattaatgtcctattggattagggccccacccttgtacactcactttgggggttcgggacatccagatacactcactttgggggtttgggcttcaacactggggacgggccaagttcagcccgaacaccttccagacctgaagctttggagcagtgcttctcctgtgggtctgttttctcagaatgacttcgtaaggcacaaatgaactatcagatgaaagaatcgtttcccttctttctctctcctctctctgttcatgtctgtgtgtgtgtatagccttcaaaagtttctcatcttccttcctacagcctattactatggaaagagaaagaagatctccaagccccccatcggggaaagcaaccccgacagcggacaccccaaacccgccaggcggaggaagcgacggaaatccattttcgtgcagaagaaacggaggtcttctgccgtggacttcaccgcgggctcgggggaggtatgttctgcccggggcacctgccagcctgtagctctgtcatctggccctggccggcaagtgtggctgcttcacagcagaggtggccctggagattgtggcaagatggtcagaaacactgaagaagagccccctcctccttacttgctgaaaacaaatgtagtgtgtccagctgctttggctgggaagggcctcgtagggcccacgggtgggaccactggctccatttccgagggtttgctaggtggtctgcactgggcccagggtctgaccgcggggccaccgctacaggcccccgggccaccagccccttaaatgccttttcctccttcccaggaaagtgaagaggaggacgctgacgccatggacgatgacaccgccagtgaggagaccggctccgagctccgggatgaccagacggacacctcgtcggcggaggtgccctcggcccggccccggagggccgtcaccctgcggagcggctcagagcccgtgcgccggccacccccagagaggacacgaaggggccgcggggcgccggctgcctcctcagcagaggaaggggagaagtgcccgccgaccaagcccgaggggacagaggtgatgcccgggcgtggggacagagggcttcccgctgggtctgaagaagcacacctgttacacttcagggccacgatgtggggaaacctgtttaaaatacctccaacagcagcagctgctctagctagttcccaagtcaggaacaaaggctggcacttcacctctgggtggaggggcctttcggcatcagaatggagtgcccagggtggagacagcgcctctttcctggacggctttagtgccacctgggttcttgtcaggaggagggcacagtcctcagtttcctttgaagtctgggtttccagaaattccttccccgcatctcccctgactgcgctgtgtcttgctcccacgtcccctctataggacacctctgtgatgttttaaaatatttaatcagtgtttcaggtctcccctagccccatgggtggtgtgagatcagcagaaagggccactggcaccaccattacagaaacactgggggacactgtctcgtgtctgcttggacgtgccccttgtatttctcctcttttctctaatcagagatgcttcgttcataagcaggcccaaggtttcctgaactagggatgcaagagcgactgtcactgtgcctgccttcttccatctgaaggcacatgagtcattgcagggggcatcatcactgagccaagaactttctcagggactgagagtgtgtgcagctttttcaggtgcccagtgagggagcaaagggaggcagtggcttccggccaggaacggccgaggcctggagagtgctggagaggacccagccagctgactgtgccgcagctgagctcctcctgccctttctctgcaggacacgaaacaggaggaggaggagagactggttctggagagcaacccgttggagtggacggtcaccgacgtggtgaggttcattaagctgacagactgtgcccccttggccaagatatttcaggagcaggtacggtggttgccgcgtgtcgattgtttgatgtgctgagactctgcatctgaaatgaacctcgtgtcctagccggcttcctcgtgacacctgcgagggggttcttcggcgctgctcggcaggtgtgcgagacccttctccctccaaggcccctgctgagagctgcctggcagggacgagagacagagcctcattcctgctcctctcaggccccaccagtgccatggtggggggcggaggggtgactcttccaggctctagtgacaccacccagcaggggtgggaggtgcctgttgctgccaggtgaggggtgcgagtccacgctccccctgccatctccaccgactctacagtgggggctctttaccaccaggcaggggtgagagtcccagttccctggctggccctttcagatgccaggtcagtggtgggatggggtgcccagttgccacctggccaggccggaagtcaggatagcacactctgccttggctgctctcagtggggtccgtccagccctccctgtgatgttcagctgcagaagagatgctgctgtctcacggttttttgtcttgctgggccaccccttggccaggcctttgtctggagagaactggttttggttgagcctcctgtcagtgccttttggcaaatctgggttgcagcttcttcagctccaagtctcaggggcatgaagctcacacacaaacagcaaccacaacaaccagagagctcagcactgtgctgtcagctgggggcccaggcccctagccggtctgccctcctttctccaccttccagagtcttctgtttgtgaatttgtatataatgcccatggatcttacttaggcctagtgggagaaggagggaacagtgtatccacctggcctgcccagagcagaagcccgctggctggtgtgtcgtactgaatgctgctttcgtcattgttttcttaccttcctcacttctttctgcataaaatatttttaagaccatggtatggtgatggacaaatgcaataacagtcgatataatttctaccttaaaggagcctatagtccagcagatgaaatgagtatagttagctaaaacacaagatcatatgatgctgtgtcctaaggaagaagagagggtttttatttacattatcccttaaattaatacggaaacaagttgccactctgcacacacaccaccttgcatcctgcctcactggccttgcagaaaatgccaggctcttgctgtactctgtgcttaatttgttgaagtttcttgcgttgtcctggtgtaaatatctgtgttcaaagacctcatgttaaaaaaaaagtactgtttttcatataatgttaaagataggtttattcagtctctttttagatcatataaatcagtagtctagaaagaggatatttccagcattaaatcaggaaacataaaaggtctgtgacttcctgtgtacccagaaaatttcccagcttttctcccaagttcatgcagcaatgaactggaaaaagcaaattaaaatggtctccagtgccacccaaagagagtagttctttcccctgtgtcccgagaagtccaagagatgaagtagttcatcctattgacaaccactagaaccttctgcagacacccactaagttcatgctgaaagaatgattaggccggccatggcggcttatgcctgtaatcctaacactttgggaggccgagacaggcagatcacttgaggtcaggagttcgagaccagcctggccaacgtggcaaaaccctgtctctactgaagaaaaaaaaaaaattagctgggcgtggtggtgggtgcctgtaatcccagctacttgggaggctgaggcaagagaattgcttgaacctgggagggagaggtagcagtgagccgagatcgtgtcactgcactccagcctgggcaacagagtaagactccatctcaaaaacaagcaaaaagaaagaaagaaaaaagaatgattggaggcagagggagtcacctcctcaccttctcacactggccacccttcctgtctggacaactctgaaaagcaaccagggagagacttccttagacctaaagaacctgggtgatgagcttgtccctttaaataacacacaaacaggaaagaaagacaattgtaagaaatacaagggcttaggtgatcgggggcttattgataagccacatctccattttgaaaacaaaattaaagcaataggttgaaatgctgtgtaaagcgctgcccagcacagcacgttgcctgtctggcatttattgacagtggtgctgcggcgagataagcgttgtattcaaatacgtgacaagcgctggtcatgcatgtttggttgcgctgatcacgcaggtttggttgcactgatgcgtatctgtcagtccctgtgtgcattcaacatacaccgattcagtccctgcgaggtgccttctgatagctaaagatacaaggtgtggcattctgtattactctaatgttttggttttatttttaggctcaaatgcttagttttcacaataaaaaaaagtttagttaggcctgaatgaagagcagatttctcatttctagatcccaggttaggtatgagggcttataccttgaaacgtcaatagctcctgtgtctgtctacactgtgtacaagttctcagtaataagcaagaaagtgaaacaaagctggtatggggaaaagcctaaagtattgagtcttcctttcttatattcctaagcccagttgataacaccagagaaaagtttcatgccttccctaagctaagccttctaggaaatggaacactgccgacactgtcccccttgtagaatcaagttgctcttttttttttttgagatggagttttactcttgtaacccaggctagagtgcaatggcgcgatctcggctcactgcaacctccgcctcccgggttcaagcgattctcctgcctcagcctcctgagtagctggaattacaggcacccgccaccatgcctggctaatttttgtactagacagagttctgccctattgctcttctaatattagtaaaagccttgcctttcatccctacttgtttctcttacgagagagaaaaatagatagactttcattgatcatcatctcattcctgtgtaatttcacatttcacattaggcaagttcacctgttggaataaaaagccattgcccactgggctgtctgaagtacatgggcacttgagtccttttctgtcccatcagacctttaattactaatttttactaattggttcatcgtcatttagcccaaatactccagctctgagttggtgaggcctccggtaggtcaccgcaggcattgtctgagattacaggtgagctagaaggaacccagagactttcttcactggcatgcgaatgagatcacagtgcacagcatggtcatcgctatgtgcacgcaggccctgaacgttataaatgcagagattattataatttgcaaaaattctgaactccccatgaccagcgtctgtgccttttatttctgaaatgttatggcaaccgcttaaaaaatctatactccataatctcatgctgcaaacctgtacattacacagtaaaaatccactcatctataactaagcacatacaacactctaaataaaattttacctatgcattcagctttcatcagtcagagacagcgcaataagcagactgctcaaatgctcaactgaccttaatgaaaaaatttcaggatagtttataggcttagtccagattaagctgtcctttctctacttctctagatctcaatacctccattaggaactaccagatcctcacccgagtgctctatcaaaatcgatttaattttgccctgtgctaagcatgtcgtatatcttatcatatttcatttctttacaattagtccattgatggtagttctgtgtttaacattaaaagtgatctgccggcagctctcagttctataggaacatgtttataaaaatcaaaccacctgtgaggtatgctgttatctaaataatccttgaaagaaaaaatagtcttccagataaagtggctttctgggctcgtcatgattttacctttggtgtctccccagtttcctggaattctatgttccagggaactagctgtgttctttcagtccctcttggccttaataattcttactggtccctgaagtctcagttcgaagccctttcagcacccctataagactggcttggttgcctgtcctgtttgagcccttagctctgcatccatatgttaatatccctgtatcctaatagtctgtttacttgtctgccaccctccagattcatggggtgtccagagagggaacctttcctttgttcactgtgacattccccagaggccagccaagtgcctgccacttagtagatgctcaataaatattggcaagtaaatacatgagtgtgtgcatctgcactgaaatgtggtacatgcattggccaccttcactgaaattttctgtaaagaaagagttacacgaatattttcgtgctgatagtcagtggtgattgaatcaccatcatgcccaagtacagatgttaaagactgagctacagttttcccttcaaagtttaatgtcagaaaactacagttctcatgccaacactttctctaactagctatgtgatcatagttagattggctagcttttctgggcattaattttcaccaggaaagtaaacttcctgggaaagtaaaataagttctatttctattctttcctgttctatggatgtcattgaacataatggttaagccaactgtccatggtttaatgacatccacagaacagaacagaatagaacatcagccctctgcctacttaaaatgtgtttttatgaggcccatggtacctggaagactttgagtccctacacccatgccctcttggtgtaatttgatgtattacatgtggatttggctctgaaagtggaattggcctacaggccccaggccagaggtccccttggtttcttcgcgacctagagccaaacacttatttcacagtactcccaaatccccccagctgcaatcagccttttctgtagcatctgaaaagaaagtaaaataacatgtatgagcactatagagcaagggaaaaatgatataaacatagcatgaaaatatagtgacagttttctacagtttgtctcctgctttcagtgtgtatacaagacagatctgtttactttgtgatttgataaggtcacctttggtcttggttgaacgtggcttcgagttgcttacatcatagctagtgctcatctgtaatttaaaaataaaaaatgacactcacattgatacttttaaagttaatgttgcatttttattgctacagtacttattagggaatattgttgcttttgaatctgatctgaagataaattattcctgctcttaacattagtcttttgaatctgatcagatgatgaatctatgcttgcttagaagattagtctgctcaaggctaccatttatacacactttgcctttttgctttagatattttcaagacagctaaataaaccgttagtttaagaaaataagctgcctgtgcgaaagtcactgacaggtgttgtcggagacgtatgatcttgtgcttttgcttggctattaatgtccttgtggcttatggcagccctgggtataattcttctgcaagtggcagaaattccagtatgtagagctcacttaatgctctcacggtaccactgatcatcattgcctggggcctgcaatctctcagacccctcagtgactccctctggacgattgagatcatcttggtaaataggagggaggattgcggttaaagtcagcagtccggtcaaatgacatctatgtgaatgaaccagattactataggaagcaagctgctgaagagacagagatgtccagtggaagggtcttagagctttggagtgggtctttgtatgcttcctcctgcagcaaattcaactgaacattcattgaatgaatgtcttcatgccctgtgtgtaggtagagaaaggctgaggcaggacacagtggggcaacagatctgtgtacgagcgacacctcgctctggggagtgtgtgtctgtaaatggtgtgtgtgtgtgtgtgtgtgtgtgtgtgtgtgtgtgtgtttccctttatggaaacctgtgctgtcgttggcatatctgtcttgagcatcttctcacccatcctaatggtgaaatgccagaccttggcagggagctgagggagccttgtcttttagtagagattcctttgcttagtgctcagatgaagtctcagcatcacttagggaggacctggccctgcctggggtggagagtgacttgccctcccagcaaggggcgataagcttgggaagcaattcccgcagcaacccacctgttccagctctttctacccaccagggtaggtatgtgagtttcagagtagccagagtgcccttagccaaaagctcttgtatttgtattgttgttttttgttgttgtttagagagtctcctgctgtgttgcccaggctggagggcagtggtatgatcacagctcactgcaacctcaaactcctgggttcaggtgatcctcccacctcagcctctgagtagctggcatcacaggtttgcaccaccatgcccagctaatttttaaattttttgtagagaccgtatctcaccgtgttacccagacttgtctcaaactcctggtctcaagcgatcctccagcctcagccttccaaagtgctggaattataggcgtgagccactgtgcccggctacaaaaagattttagtaacacaaagattagacagtcatcaagccgggctggtatctctaccaacaatcccctgaattgaatgaaacaagagcatcctgttgtcatgtttggccccggactggagcctgctgtgacgcatctgtgtaccccagtgcacactgccccttctctaacctgcctttcttttcctgcaggatattgacggccaagcactcctgcttctgacccttccgacggtgcaggagtgcatggagctgaagctggggcctgccatcaagttatgccaccagatcgagagagtcaaagtggctttctacgcccagtacgccaactgagtctgccctcgggaggtggcccattattgctgggatgcggtgttggtaaaggtttccaggactgaaactttgattttccgggatatgttaaatggtacagccactaagtatcaccagaaaaccagaagcccaggatcttctgcctccgccagcctgtgagctgtttccatgttttcaaagcacagcagcagtcgcttctggggagtgccagttaaagtcatgcatcagaccctgccagacgtgggcctgcttcttggctcacccacgttttgcctttctcctgccccaaatcaggcagctcccttggagcagggtttcctcagatgaggactgcattctttgaaaacaaagaatgtcgccaaggaagaaacctcacgccatgctgtagtgtttcctgtaatcacacgagcacatttatatatgcagtttcccatggataggcgtgtgaccctggttgagtggcacctgcggtttcatcttggtggcaactcctttgcaatgcagctggcagcgacatccttataaaaacatgtgctaaagctctgtcctctgttagaggtgccttttaggaatacggggagtgaaggaaggccggcaggcatctccatgcaactagatggtttgtttgtttgtttgtttgtttgttgttcattttgttgtgttttttgagacagggtcttgctctgtcgcccaggttgtaatgcagtggcgcaatctcagctcactgcaacctctctctcccgggttcaagtgattctcctgcctcagcctcccaagtagctgggattacaggcacccaccaccatgcctggctaatttttgtatttttggtagagacagggtttcaccatgttggtcaggctagtcttgaactcccaacctcaagtgatctgcccgcctcggcctcccaacgtgctgggattacaggtgtgagccactacgccccggcccaactggatggtttttgattgaagcctagaacatctgtagagacaaactctacccagtcttttctagaccctcaactatctccagtgttgttgtttaatcgtagccggatcagggagtgagtcttttaggcaaatgttggattatatatcaaaggaaaagcttagtttcagagaggaggaagggaaagagatgtgagggaagcatttcatcaaccagctacgtcccccttagaaggatcactgcagcaggtcaccgagcaggagtccctctgagcgtcccttctgtctcgttctgccctagctggcagcatatgaaccaggcatgatgcagcaggagcagtgaatctggagtcagccacttggcaccctggtttcgctgagaacaaactctgagatcttgggtgacttctcatcactctggacctccattcctgtgaagtgacaggtgtggaccctgagggtgcggtggtgagcacactgtctcctgctggcattcaccccactcatgctggaaaggaagatccagatcgtacaaaaatgagaaaaagaaagaataagaagggtctggtcccagttctgactcggccattcttacagctctttctggctttgagtttgcttgtggaatttcctgggcagttgtgttaaatccgccaggtcacgtgcagacaaagctgtggctgcgagagttggctggcctcttggaccagaagccatctccatatcctcatgagcgattccatatctccactcagaccctgtggactacagtgttccgctgtggtggctgccaagatgccttcttaaacttatgcaaggaaaccaaaccctcccacagttcccaagcagacactggaagcagaggcttctcacccttcctgctttttcaccacaatcaccttgagctcgtcccttggactagagtctccacagttccagtaaaattctgcggtgggctgatgagctgcttgcatttctgtgacatttccagatatgattctcagtgggattttggaaactttgattgctcaagctcacccttcttaacattctgtaatggttacagatgagaatggaaaacacatattttatggatgaggcgttttggtctcccctgcagtcgatttctagaatcaagttttagagttcggctgatgcatctgcctggggacctcagatgggaggagtgtgtcagttgtaccccgacagaaatgtctctgggatctgtggctggcttgccccgggcatctctcctttaagctcaagttttgaactctctgcggttttccacccctgccttctcagccacatgcttttggccttaaacgctcagtcttgtggagttcaactctgtcaaacgattggaaagggcatccatttccagatctttggcattttccccgcgctgactctttgatgatccttcactgtggccttttcaagctcagctgttcctgttgtatttgagacgagggtgagggaatgtggtggccacaaaagaacagggacttgcagcacaaatgtcacttctgtctcccttttcagtggtagcacggaggaggaggtgctgcgttggagggaggggatcctccaggagctctctggagcccatctaggaagctagagtgtgtggcccgccaggagctcaggaaggatacagccactgtcgcaggggaaagtgtttgcttcccgtggagccaagcgcccaagactctccgtatccttcaccctgacagtttaacttcagcgtttctctgtgcagttgcggtcaccatgggtgagcactgtctgtgcacgtgccagggaggagatggctgggaccactgcacaggagggcgcagcctggcgtcgccatgaaagttgtctctgtgccatctctccggtccttgaggagagcccagaaagattttaggacccaggaggtgcttttcctccagctgttgccagtgtccttctgagcctggattctccggggatttccgtcgtggtggatggacttcacatcagcagcagttctggtacagaattgtaatgtgttttcatttctctgtaggattcacctctcaccagcgtctgtcttaaaggtagggccaatttcatggagcatttttctgtgtgtgtccttgttgcttttgccagaaaaagtggatttgacatgcgtgccccgatgccaccatagcccctaggccaacaatgtcatggtctaaacaccaaaaagtgatgccccgcattccttccctggatggtaccgtttcttctccgtctctctttgatgattctttgggaccaaagtcctctccttagtgcgcctacttcctgtgggcatcatgccacttggaacttattggaactggcccgggagactctgcagtctgcgccgtttgaaaaccctgagaaagagatgccacctcaacttgaatcatgacagcccatcgctcagtctcaccctaaactcatggagcttgtttcagctcctcacttcttgactgtatttgtactatgttgaaaaaatatcctgtccacaaagacataagcctaacaacctagaaaaacaacagggtactactggcattacagaacttctttgcctttcaaaacaaaagcaaaacacagtgaacttcaccacggagctgcacagcgtggggaactcatccatcactttcaaaattagagtcatttgatccaagttggagtcagacacagtatttgagctgcacggcttctgggttctcccaccttatttgatcatattcgaaagattatttcctgtgtttgctttgatttgttcctcagtacattaaaatgatccacaccttgaacactgccctctctagaaggttgattttgatcagccttttgaagatgggtgtcgtttccctaacttatctcacagaattttgagtgttgtatttggcaagttctgagatttgccttctgtcttatgccaaacacccctttctaagagctgtccccgcttagttttagaagtactaggggttttcatacttattttatagaacacccatttatatttatttctgtatatagaactaaaaaaaacagtagtgttaaaaatctttgttgtggtttgagcatctttgctgcttttggattgagatggcgaatcaaggcttcacttcctctctcttctgtctttagaaagctgtgatcgtgcgtgcaattatttgaaaggcaacatagtcaattaagaaacctgtagttgttaaggaagaaattgttggcaagatatccatactgcccatatctcgttggtgcaataattaaatagcaaaggaaatctgtattggcaactattataattcaataattcttttgtttactgcccttttctgttcaagaattttctggaaattactccctttcacatggttgaactcttaagttgaccagttctcatagctctatcactagaatggtttgcagataccccaaacatactatgataaaatcaaattgtgctacttttgacccatgtaatttacctaaaagttgtaattgctgacagagtactgccttgaattttggtttaaaacctctctagtttcaatgacaagtaacaactcaaataattccatattgtttgaggaagaggccataatccttctgaattgttggcactaagtaatgggatttggcccagtaagtatgacggtcgtgtcgcctaaccaacgcagagcagtgctttttgtgtggctgaagcgatgtgctgacgaaaaaaggaaaattctaggacaatcgttggctaaaaatcaccttaggatgaaaaatttgaggcaaatttttttaaatgacagaaaaagataatcatctcacttgcttgaaacaggagccagcatgatctctggaagcatcaactatccctcgtcgtgattgttgaaagctctttcactgttttgcattctagtttgaatagtttgtattgaaattggattcctatcttgtgtatgtttttggtgcgtaaaagggaaaaattggtgtcattacttttgaaatttgcaggacgaagggcatgcttttggtttgctgtaagattgtattctgtatatatgttttcatgtaaataaatgaaaatctatatcagagttatattttaatttttattctaaatgaaaaaaaccctttttacttcaaaaaaattgtaagccacattgttaataaagtaaaaataaattctatggtggtgtttgggtctttgtgttgaaggtcattcaatattatctttagcgtctgcattagttattttgttctgaattttttgttttgtttttgccacacactaaagccttatttctaggttgttaacgaccacggctctcaaagtcctgtgtgacctctcagagtcacctcctagctccagaatggaactttctggtcgaggaacttgtgtttattctttttagttgttaaaacattctcgtgtatcctcacacaactacctctagccctcccactttcaatcatttccgttattctgggatttcctgatgccttagtagaaagactgctttattactatgagagcaataattaaataaccacatttacatttatcatttttctttaagtgtcacacataggttttaggcaatgaagttgggataggaagagagacctttgccatcctaccccatctctcggatctctcgcaggcagaacctgtccccttcctctgtcaccacaggttcaggtagcgtctcctagggacagggttaagggagaaggaaagcatctcctagggacagagttgagggagaagaggagaaaaagcactgaggtaacggaggtggaggagtgttgaacgatttctttttttcatacatcccagatgatttcaagtatcttgcttcaccttgttttttactttattgctttctttttagagacaggctctcgctctgtcaccccagagtgcagtggtgcagtcatttacttctctttaaatattatttttgctctgatggcaatcacattctacatatagaaatttttcttttgttttaattatggaaactttttttttgagacagggtctcactgtcacccaggctagagtacagtggcatgatcacggctctctggagcctcaaacgcctgggcttaggtgatcctcccaccttagcctcctgagtagctgggaccacaggcatgccaccacatctggctgggaaactttttttaataggaaaaatgaggcctaagagggcaaaatgggaaacatattgttcatttcctcaaaatacaccggaagcaaatagataaagggtgaaatggctgagtaaataggatggttgtacttcaattttgcacctgaagatctttgagaagagaaagaccaaagatataagagagtggaagctgaactctgttttgcacctctaaattgaatgaatcaaggcaagaaagaaaatctgtatttcttttcatgttaccaccgaaaacctatttttaattcttctgctctttagtgaggctgtttgctcagttcactggaagttacttcccctttgtcttggggtttgtgctgtgactatttcaagtctgtgaaagagcatgatgcttactggagtttcaaggactgtgtttaaagaaatgccgtttatgtcaatgtgaccttgggtgattccatgtgaagactggacatattatcagtttggtgaaaatacaacatcaaaataatagatgggatgcaaaggtttacttggggatggtttcatcaagaggtttttatgttgtcagcccaagcctgggttataacacattccatttaatgcagttcatttgttgtgtcaaagtatgttgttttgtgttctctataactaatatgtctaaatggtgcatcatagtaataagtaaaaaggaaactcttcctttgttattctgaagtccgatcaacacacagtgaccactaccaccatgtcttcccaccaaccccaaaatttcttttatcataggtattgccatcttttgcttagaatttttggaataggagatgtacattggctaggagaaagagtacaaacgttgcactttttactaggttcaaatactcattctactacgtgcaaggtatgttgtacaaagcctcagttttcttttctgtaagaggtggatagtgctactcctacatggttggtaggaggattggatgttagataaacattgtgtgattctaggcagagttagcatgaggtagtgaaccagattcccagcatcactgggcaccatcaactcctgggcctttgagcacttgctcattggaacatcctggctgccactaccattgtctccttcacatccaccttggcagaaacttcagccaccagtcccaatccaattaagtcattgagagtttgggccctacccaccaaacttagattcaaatgaagtacacaccatggtgtgcaggatttggcttccccaacagtcaaccagaagggctgcgtgacaccactctcaggtaaagcagaatttgtgtcccagggtaccagcttggatcagtgagagatgggagggagctagcagcagtgtcctttccctttccctggatgatgtattctgaaaaatggtagttttgtttagcctgactagaaaccttgagagagaaaccttaagctgaggtcaactctataacgtaccacctggtatttgctttccagccctacctgcctcaatgtctattttcccttattcctgctgcctcgatgtttcattccacaataaaatattagcacatatgctttgcctcagactttgttatctttgaagcccagataagacaatttgtgcaagaagcttataaaacagcttctcagctaggagtttgcagtcagattgccacctctctgaaagcagtagggacccttttgctcttggtaagtaggggataataatcctgacactctggcatcatagtcactaaagcttttgcttctggttgagtgcacagcaggtggaaggcatgggtgtgggagattaactggccactgcttatagtaggggcaatgatattaatgaagacatctctatggtttttgcttttattctcttgtttaagaaaacgtatctattcctaggacatagacatattctcctttattttcttttaaaagtttatgttttgttttccccaaactctctagaattttctttgtggcggtactaccagtattatccaaagtggttcaagtgcagtgggtcacccgtgtaatctcagcactttgggaggccaaggcaggagcatcacttgagcccaggcatttgagactacagtgagaccacatctctacaaaaaaaaaaaaaaaaaaaaaaaaaaaaatggaaataattagctgggaatgttgatgcttgcctgtggtcccagctacttgggaagttgaggtgagaagatcacttgagcccaggagttagaggctgcagtgagccaagatcgcaccactgcactccagcctgggcgacatagtgagactctacatctaaacacacacacacacacaaagtgttagcgctagcttccactcctggcataggaaattcatccctgctctgcaccttgacaacatgcagtggtgtttttcatgattgctaatctgacaagtgtgcaatgatgtggaatgcacatgtgggccagtgaaattgccctattctattctaattgcccagggtctatcctttccccattgactggccatcccacgtgtcatatttcaagtttacattcaagtgcaggtctacgtcaggtcaatatttggtttcattggtgtgtgcgtctatcctgatcaatgctgtcatcacactatctaataacccctgttacttggtaaaggaaattttcctgccttattgtttctattcaaagttgtcttgcttattcttgatattttattcttcactatgaatttagacttgttcaagtctagagaaaactttgttagggtattgattggatttgtattaattaaatttataaaaatttggggacaattgacttcttttatactattgactatgcagaagaggatataatttttaatttattcgtgtattttacatgtccttcaatgaggttatgtttttctctgtaaaagtcttgcatgtattttgttaaatgttttctaaatgctttataattttttactatctttttttctgttatgttttgttcattattactgagactctactttttttaatattctaatattctatacagcaactttagtgaactcaactgaaagggaatttcagttctgaattttttgggtttttcttagcctgagatggtttgtgtgtccttagaattttggtttgtgagtgggagatttttgttttgttttcgatttatttctccttctctctcttgtttattgaattgctggttttacatttgcttctgttcatctcataggctgaataaatagaatcagatcttttttttttttttttttggacatgattgaaatttgctttaaacatttctttgcgggagatgacaccacacttctactcaatgaagaaaaacatttttacagtccagaggtcttttatttttttaacacccattatgccatgaattcacagagaagaggttcaggcagctcaagctccttcctgttaattctcacaaagtgggcttctctgggtggaacaagctggcgcttcagctgaacccagatatctttcccttggttttaaaaatcttcattcatgctttcacatgaagctgtagatcattcatttccattgttccctggtatcctattgtagggatatgccacagttgatttatctgtccaacacacacacatacacacacacacacacacacacacacacactgctgtacttactgtcatatactagtgctatgccaggaagagactgttgagccattagtagtgagtcatctatcttggaatccttgctttcattataccttagcattgcatatgtggtctttttcccttcatccaggtgccaacattatctgtccagctatacaagaagccccttaagagatgatttttggtgtc

SEQ ID NO: 1150 - DNA, 2715 bp, Homo sapiens
attaagagaagagacacttgctcatcaggcatggagagcactttgtcagcttccaatatgcaagacccttcatcttcacccttggaaaagtgtctcggctcagctaatggaaatggagaccttgattctgaagaaggctcaagcttggaggaaactggctttaactggggagaatatttggaagagacaggagcaagtgctgctccccacacatcattcaaacacgttgaaatcagcattcagagcaacttccagccaggaatgaaattggaagtggctaataagaacaacccggacacgtactgggtggccacgatcattaccacgtgcgggcagctgctgcttctgcgctactgcggttacggggaggaccgcagggccgacttctggtgtgacgtagtcatcgcggatttgcaccccgtggggtggtgcacacagaacaacaaggtgttgatgccgccggacgcaatcaaagagaagtacacagactggacagaatttctcatacgtgacttgactggttcgaggacagcacccgccaacctcctggaaggtcctctgcgagggaaaggccctatagacctcattacagttggttccttaatagaacttcaggattcccagaacccttttcagtactggatagttagtgtgattgaaaatgttggaggaagattacgccttcgctatgtgggattggaggacactgaatcctatgaccagtggttgttttacttggattacagacttcgaccagttggttggtgtcaagagaataaatacagaatggacccaccttcagaaatctatcctttgaagatggcctctgaatggaaatgtactctggaaaaatcccttattgatgctgccaaatttcctcttccaatggaagtgtttaaggatcacgcagatttgcgaagccatttcttcacagttgggatgaagcttgagacagtgaatatgtgcgagcccttttacatctctcctgcgtcggtgactaaggtttttaacaatcacttttttcaagtgactattgacgacctaagacctgaaccaagtaaactgtcaatgctgtgccatgcagattctttggggattttgccagtacagtggtgccttaaaaatggagtcagcctcactcctcccaaaggttactctggccaggacttcgactgggcagattatcacaagcagcatggggcgcaggaagcccctcccttctgcttccgaaatacatcattcagtcgaggtttcacaaagaacatgaaacttgaagctgtgaaccccaggaatccaggagaactgtgtgtggcctccgttgtgagtgtgaaggggcggctaatgtggcttcacctggaagggctgcagactcctgttccagaggtcattgttgatgtggaatccatggacatcttcccagtgggctggtgtgaagccaattcttatcctttgactgcaccacacaaaacagtctcacaaaagaagagaaagattgcagtcgtgcaaccagagaaacaattgccgcccacagtgcctgttaagaaaatacctcatgacctttgtttattccctcacctggacaccacaggaaccgtcaacgggaaatactgctgtcctcagctcttcatcaaccacaggtgtttctcaggcccttacctgaacaaaggaaggattgcagagctacctcagtcggtgggaccgggcaaatgcgtgctggttcttaaagaggttcttagcatgataatcaacgcagcctacaagcctggaagggtattaagagaattacagctggtagaagatccccactggaatttccaggaagagacgctgaaggccaaatacagaggcaaaacatacagggctgtggtcaaaatcgtacggacatctgaccaagtcgcaaatttctgccgccgagtctgtgccaagctagagtgctgtccaaatttgtttagtcctgtgctgatatctgaaaactgcccagagaactgctccattcataccaaaaccaaatacacctattactatggaaagagaaagaagatctccaagccccccatcggggaaagcaaccccgacagcggacaccccaaacccgccaggcggaggaagcgacggaaatccattttcgtgcagaagaaacggaggtcttctgccgtggacttcaccgcgggctcgggggaggaaagtgaagaggaggacgctgacgccatggacgatgacaccgccagtgaggagaccggctccgagctccgggatgaccagacggacacctcgtcggcggaggtgccctcggcccggccccggagggccgtcaccctgcggagcggctcagagcccgtgcgccggccacccccagagaggacacgaaggggccgcggggcgccggctgcctcctcagcagaggaaggggagaagtgcccgccgaccaagcccgaggggacagaggacacgaaacaggaggaggaggagagactggttctggagagcaacccgttggagtggacggtcaccgacgtggtgaggttcattaagctgacagactgtgcccccttggccaagatatttcaggagcaggatattgacggccaagcactcctgcttctgacccttccgacggtgcaggagtgcatggagctgaagctggggcctgccatcaagttatgccaccagatcgagagagtcaaagtggctttctacgcccagtacgccaactga

SEQ ID NO: 1151 - protein, 890 aa, Homo sapiens
MESTLSNMQDPSSSPLEKCLGSANGNGDLDSEEGSSLEETGFNWGEYLEETGASAAPHTSFKHVEISIQSNFQPGMKLEVANKNNPDTYWVATIITTCGQLLLLRYCGYGEDRRADFWCDVVIADLHPVGWCTQNNKVLMPPDAIKEKYTDWTEFLIRDLTGSRTAPANLLEGPLRGKGPIDLITVGSLIELQDSQNPFQYWIVSVIENVGGRLRLRYVGLEDTESYDQWLFYLDYRLRPVGWCQENKYRMDPPSEIYPLKMASEWKCTLEKSLIDAAKFPLPMEVFKDHADLRSHFFTVGMKLETVNMCEPFYISPASVTKVFNNHFFQVTIDDLRPEPSKLSMLCHADSLGILPVQWCLKNGVSLTPPKGYSGQDFDWADYHKQHGAQEAPPFCFRNTSFSRGFTKNMKLEAVNPRNPGELCVASVVSVKGRLMWLHLEGLQTPVPEVIVDVESMDIFPVGWCEANSYPLTAPHKTVSQKKRKIAVVQPEKQLPPTVPVKKIPHDLCLFPHLDTTGTVNGKYCCPQLFINHRCFSGPYLNKGRIAELPQSVGPGKCVLVLKEVLSMIINAAYKPGRVLRELQLVEDPHWNFQEETLKAKYRGKYAVVKIVRTSDQVANFCRRVCAKLECCPNLFSPVLISENCPENCSIHTKTKYTYYYGKRKKISKPPIGESNPDSGHPKPARRRKRRKSIFVQKKRRSSAVDFTAGSGEESEEEDADAMDDDTASEETGSELRDDQTDTSSAEVPSARPRRAVTLRSGSEPVRRPPPERTRRGRGAPAASSAEEGEKCPPTKPEGTEDTKQEEEERLVLESNPLEWTVTDVVRFIKLTDCAPLAKIFQEQDIDGQALLLLTLPTVQECMELKLGPAIKLCHQIERVKVAFYAQYAN

SEQ ID NO: 1152 - DNA, 121624 bp, Mus musculus
  misc_feature (1)...(121624): n = A, C, G or T/U
tggatatttgtagtttttctttttaggatagtaagaggccatttttaataatacaacttccaatttcaaaaactgtagccttaaatatatgctaaatatcccaaatattctacctgtgtaccaatataaagctttggactttaactaatttgaggatataaaaaccctgaattatttaaagctttagaggttcaaattttaaaagtttattcttaaaattaaaaagacataagcttgatataaaatctttagtgtgtgtgtgtgtgcgcgcgtgtgtgtgtttcatctagtatcttctccaatgaatcacaaaacaatggtttagtctgctatcccaacactagggagactgagacaggatcttgtcactttgagaccaacctgggcctcacaaaataggcacaatgacaaagattcagaatcaggcatccacacatatataagtaagcctgtatagtagcatagctaataataaacagacactcaagaaattatagatattatgggtataagacccagatttttaaaattatgattaattatgattaatatgtttaaaaatctgataaaaatggacactacagagaaccaaaacattttaatagtcaaatctgaattctataatagaaattatggagtaaaccaatcatgcttagcagctcaacataacaaagtgagaccggaaaaaaagatcaaagcacaaggagaaagaaaaatgattaaaattatttttaaaagatgcctgagacatagttatcacacagaaaaatgcattgtgcatacacacaattaggatctcagaagaagaatggggcaaacaccttttttaatgagataaaagctgaaattttatgtaactgacaattttttttttaaagccaaactgcacactcatgtttctcactgagacaagcaggtcacaccacattggctctcactgtcaaacacactaagcctgggggcctctgtgatctgctctctcttctcctgtctcagtaattatcagtcccagtggtcctcaccctccgagcatctgcactccctgagaattatgtagggagaattttacagatctccaagtcctcctccacccacctgatctggtttagctgaactgcacacggggagccgagcatctgttagttttgaaaagctcccatgaaggctgtaatgtgcaactctgagaaccgtgtacagcagctctgtttggaccaggggagctcaactctgaaaagaactaggaacctagcattgcgcccaaattctacacttcaggcttaccaaccagagctgctgtttgtattgctgctgctgttagtcagccactgttggctctttattcccatcctttatctggagtagagtctaagaaggaaagaaaaatgggtcttttattaactctgaaaaccccagaaatctgttgaccaaaaatctgaacaatgattcctttgatatcaaaagcaagtgccgtctgacatgttggtccttggtctaggcctgcactatgttttaaggttttaattagtgtatgtctgaaagtcacaactatgaagagtcagaaggcctttgtcaaccgcatcatattgaaacccaaggacatccttgtctgtgtgagcttcgagtttctctccattgagttttcattgcttttcccatgtcagaaatcaactataaatttagtaacttaactggctatgaactaggaaaggcttcagattgattcagttgagacagatctactaagaagtgggctaccattaagcagagcctaccacaaacaccacctgggcaccacgaggaagattacctcataacgcagactgaggagctaaataatagcagaaaggcactgacaaaatgagtggcagccatggccccttggcaaaaacacagcagcattcattaggcccagatgtcactgagtgaaggttataaagtggataaggactatggaaagagattatctagggatatagaattccgagtagataagaagagtaactaaagatgtctgttgtatagcatggtgactgaaattggtaataatatatggtgaactttaaaatctatgatgttgcaactagcattcggcaccatgtacatcataaacataatttcatctaccaaaagttttaaataagtagggaaacgggcatctatgggctgtaaatcatttattgcttccataaaagattgaacaaaatcctacagacagttttgtaaattataagatcctttgttagagatggtcaaggtgaactgacctgctccaacctgtgccatagtggactttagttccagtatagtactacagaaagagtacctgaaactccctctgtacatccttgtcagcttctgtttctagtctctaccctgccactaagaaagtgtgcgaccccggagacccagtagattaatctgtaagtgaccaaaggcccgtttgccatgctcccagtcactaagctcctgacacaaagtcccagatccataattttgtggccatcagtcatgtgagttgtccagactccatacccagttacctggcatcagccaggtatgttcctccccacagttacctggcaacatccaggtaggcccagcccactataaaaggagctgcttgcccctcctctccctcttgctcatgcctctcttactcctgccctcttgctcttcctctctccccattactttctcccctttctccatatgcccatggccagcctctaaatctctactcgtgtctctctctctctctctctctctctctnnnnnnnnnnnnnnnnnnnnatgaacaccttaaaaccatgaacttccttcttctcatgggattccccgtgctggagcaatggagcaggtcttcccttaaagagtcgcacctcccacaagaagcctcatagctttcccagacagtctccaccaacccaacccgcccactcatgcaagccacagctttccccctgccctttccccttaggccccaggccagagcccaacactggccaacgctgttctcagctctttcacagcattcagtagcctctgcgatgcccaagagtgagaacctgctggtctcggcctccttgtgggccgggacccccagccggcttgcagcaggtctgcggggacctccaattgctccttccccaccactggagtgggatccagcggcttctcacaacccaacgcccacctggtggcagcttggggtccactgtgcagtcagacttcctaaatcccgccttgtccagtggcttgagccctgggctggatgcaggtccccatttttaacccacaagaaagagcattcggagattcccaggtaagaggggaaggttggaaggcacatagttctaaagaaagcacagaaaggtttacttagtaaataaagagatcttcttctattatataccaatatcacccaaggcaaaaaccacccattctgaagggaagatctttaagacacaggatgttaaaggagcgatagaacattccatccaacagagagcaccttaagctcagggagcaaaccattcaaaggcttcaggaaatcccagaaactgaaaagaatcactagactctccctccccaaaggagtaaggactgctgagagactgtcaataaagccaatatgcctagaagaggctcagaccagtcaagtggactggaagaagctgaggcaccagctgaactgcctagaaaagatattcccaaactgttgagcttgctggcaggtttccaagttttcatcaactggtacctgtgctgagtggtctttggtgatgcaactgtctttgagtaatttcttctgctgtaagaaacccctcacatatttgtataagtaaccccaataaaactcttgaactgtatgttgaggccaatactccttagcaacaatttgaatagctactaagttccttatacagatggtcttagctaatcttcagagaaaccatatagccacatatgtgagtagaaatgcaatgatttaacatggtttttcatgatttctacccaatggccttcgttttagttttgaaagtaaatcattccagtgtattaaaaaaaatggttttcagggctggagagatggctcagtggttaagagtactgactgctcttctgaaggtcttgagttcaaatcccagcaaccacatgatggctcacaaccatccgtaatgagatctgatgccctcttctggagtgtctgaagacagctacagtatcagctacagtatacttacatataataaatgaataaatctttttaaaaaatggttttcagtccacgagcctatagtactacatttattttgtcatctactcttatgagaagaaaactttgacaaaaagacttacttaaaatgatgtcttttacttttgttacacacctacataaatatcaattactataaagatagaaagcttaatttggagatttaatcaaaattctttagtacatttattttttttttctgatttttcgagacagggtttctctgtatagccctggctgtcctggaactcactctgtatccagactggcctcgaacttagaaatctgcctgcctctgcctcccaagtgctgggattaaagatgtgtgccaccacgcccggcttcttcagtacatttataaacatataattgtgagctagtgagatgactaagcatgtaaatgttcctgtagttgactttagtttgatcactgcaatgtacatgtaagtcccacaggttatcctctgatttacacacacacacacacactatagatagatagatagatagatagatagatagatagatagatagatcatatttttatacagcatataaaatctgtacaaaaaccaaatgagtgagactctagctttgccgtgactataatttggataactgtctcttctccacccatgtgttaaatgcttggctctccatcctgtggcactgtgaacctttaacagggaagacctagaggaatctaggttactgcttcccgaccccatttgtccccttctccactcttccaacccttctccccacctgtctctagtttggacccaccccctctctcttacttccttccctcttcccatacccctctgcccactcctcctcctcttccttcccccttccttctccttcctagacactagaagagaaacacctttcccaagcactctgctgggatgaactgcttcattgcaagccagagacaacaaatccaagagaacacaacctctgaaaccatgaatcacaacacaacctcagatctctgaaaccatgagtcacaatgagcttttcctcctttaaatggattttctcaggtcttttgtcccaacaaagatacactgattaacacagaccaataagaataaacctagagcagaacgtgagtagggagactgtggacaacagtgttggggtcctggcagatgattctatcaggtgtcctggcacttgagggggccatcaaattagtagttgccagaattaaccaaaatctcttttcctccacatgttcctcctcgtgtctaaagaccctttcccaacttcttccactgctctgtgcacacatcttggtgtgagcatggtgaggatgtcacaagaaatctgggacctaagtgccatgcccttgtcttgttcttgtaagcctcagaagttaggaatatccagtagagattatccataagcacttaaaatgagggaaacccagaaaacagaggtgttgagctcttctctcttgccagctgagacttcaaggatgagagtgtcactcaggacaaacaccttcattcccatctggcttctttagacagagcaatatcctccaagctcccatagctggatgatacagtcacctccctggcaagctgaacaaatgggccagaaaatgctgctcatagtctccaaggcacagcatattacaggagggagccagatgtttcctttgtgtacccagaatatgggaggtagagtgctgggagctttatactagggaatgtcctcgagaccaggggaaagggcaggggactttatagccctgcccacttagagtcaaagaggagaccattatatcagtataaaacagggccttggaaagaatcaaataagattccctttaaaacaacaatgaaatgcattttagaattgagataagaaaaagctgaaataatgtgaaagtattagtggaaactattttatcaaataccattttattgaccaacataagccaggaaaaaaaaaatgacaatttgttttgtatcttaggagaaaaacaaattacaatttgaaagaagaaaaatatttcaatgtggttttaattaaagatttaacttcagtaatgaattattttatccttttaaccggaagccataggctgtagatgagccaagtaaactttcatttgttatcttaggaactctgcttggtcaggtgactacactaggacccacttatatcactgatgataaattttaaaatgtcatcacaagttttccttgtcaataattgttcatacagaattttccattttgaacagattcctttttcactttaagcaaagactgggaggaaaagataggaaaggagaaagagggaatgaaaaataaagggagagagagtatgagaaggaatgaagggcgatgggagcttagactcaagtgagctagataggagtttcctaggtacactcttattcttaaagccagagtgtagcttactggtaggtgtgcacagtgggcagccctgagtttaattcctagccccaaaagaaagaaaacaagaaaagaaaaaaagaaagatgaggagtaagaggaagagaagaggtgaagaagaagaggagaggaggaagaagaaacaaaaaaagaaaaaaatgctttttcccaacagtactgaggtacagatgacatccaggaagctgcacattccaaatgtgtgatttgttcagttctgacacacttgtccaccagagccatgactgaacagagttcaccacttctatgtctccctaccaccacccccaccacagcccttcctgttccccaacttcttcacacaatgaggttgatatgatcacataacatcacaccatgtgttctattttatagtatggtgcctttcagcaaatcaggttttgtgtatattctgtgctgataagtagctttttctctttgatacagacatgtctccatacagaggtgccaagactgaccaagcttgacttgcctggtaactgtcagccatcctaacagagcatctcctccagatgcaggtttaccacccccctccctctattcatgtccagtcaccacagcctcctgccagcagagcctgcaaacatcttcctcatgcatccattgctttgcatttccatggctaccaaacaaacaaacccatgataatttctttcccaactttcttggaaatcaccctgtgtccattcttttcttcattttagcaatccccatggtacagccagggtgatttctttctgaaacacaatccctccattgcagttccaagtctgattgaacatagttttgttatccttaggatttgaggacaaatctttgacttgattaacttgagtggttcctgttaacctttctatagagcctgatctctgggttagttaccagagctgctagtgactcaggtcacactgtttctaaaccctctggcagtcccccatctccacccagagcccatcagcaaatcacagttcctactcttccctccgtccctctcttctctctctctcctcttcctcccactcaactgcttttctaagtgttccttaaaccgtatgatgacttctagaataaatcaaagcacatacccagttgttatattccttctactatctgtccattattattacagtacaacccgaagtcctctgactgaccacaggtcctacttaatccgactcttgctcacattctcccctcatcctctacctctgcctgcctctttcaccctactgcaaccctgacatcttatctttctgctcttggctcaacacaccccattgatcatctcttgggatgcttttcgagcttctgaatgactggtccttatcatcagaactctctgaccaccttttctcttcgggagaatcgctctccatcctgttgcttgtttttgctttctgttgctctcaatggcatcccacctcactacatcagcctctacaagcatctggccatcttgtccttcataacctgtctcttttctgttctcttctcgccacccaaggccatactgttactagtttccttgatgtttttccaggctcttcaagggctgtcctagatgaagactttagaggtatcaacctttctctctaggatattcttgtgtaaaacttctaacatcattggatggctcctttcatttaggtccgactcaaatgctggtcgtaaggttgatctttttccacaactccaattgacatagaagccctatcagcataaccattactttataccgtcaccttttattctttctcagcatgttgactatgcagtgtattagctgttttctgtggagtagggtgtgccatccagcaaagcagcaatcctttctgttactgctgtttatgttcttcttagacaaactatatatagtctcccattgagtactggaactatctgaaattaattatatgtctaatttatatcttcatgtctccaccattttgccttacagtgaacccttaaagacacagctgtgtagaggaagagaaattaactcaatcatcatttaaaatcataattgattttagtggctgtattttcagatctccctaaacactttctctcagagtgagtcccagtcaatcttgtgatatacaagctatgaacaaacaaaatcataagaacaaaaccagaaagtgatcttggtggcacatgagaggcaggaggatctctatatgttcgaagccagcctgatatacattgtaagttcgaggacagccagtgtgacaattacactctgactttaaaaaataaagatgttggagggaccacagcccatcatcagagtagtctccactgagaacagacacctgctgagcccttcctttacctccacccagggaaagatctactctggcacaaaggccatcacactgcaccacttctctgtccaccctaactggaacgtccccttctgggctggtccaggaagtcttagacaatggcagattgaggaagtgcagcgagggttgaggtaaagacatagaaggctgttgcaaaataagctggcccctttaccctttgtggaacttaatagattgggattgatccacacgatgtgaaaataaacggaagacaggcctcaacagaagcagagggtccttttattaaaacagtgaaaggaggcagtcttgggggaagtggaggctgcgcagatgctcagggagcttgacggttttgtggggcagaaaagggaacttacatctgttccgctcaagtctcaaaattgtaaccaacgtaggttgatatttagatctccttgggaactaactgcctgcaggtgttactgactggtgaactctcttgtagggagtttctcagctaatctgagacttttagtcctgagcaccccttgagcactaacccttcagactagcatctgggcgttagtctcagactcttacaaagaacacaagacccacacagatgagagaaggctttctctgaccttagggcaggaagtgttttcttccaggggtggacagggtttggaaaaaacaacccgaacttgctaaacttgcggagccctttaggcggggcttggtgtctgtctattctcctccagggctttgctagctagcacctccgtgcaaagccgagagtctgcgccgccgggtgggcagggctcaaagcacttcctcctccctgagcccacgtcctcgcctcgaggccggtccagcccagaggcgccaaccactcatctctgctcattccggtgcacttaggctcaacccggcccatctctggctcagccccgcgcatctctgcacagcctcctcgcatctctgcaagcccccctcgcaccctcctcccagcagtcaaggtaagcggcaccctagtcctgcgcacgggtttggggtactcaggctgccacactgcgtgtcctatgggggtgggggagacaacagttgtggcacaggtccacgcaccggccacgtgaacacgccccccctcccttcccctggcagccaggaagcttcaggtcccctgggcacctcttgtgctcttgacctgtggctccctcttctccccactgcgttttgttttaacagattttctgcttaagaaatgttaccaggtctcagggaccccacattaaattgagctaatcttgaaacaagacatcccctgaggcattttagggcacctcacattaagtggtagtctgaggagactcatttgagagtcagaggacacatagctcaaagtgtttcccttcatttaaaactttaactgcagttctgctttttgaagcctgtctttccctctcagtctccttttctttgtaaaaaatgtggtaaggataagtttgaataccagacaagggtttcctaatttagtttggagtgaagattcagaaaatgctttatatattgaaaaacaagaatgctcttgtataccaccaccaccaccaccaccactgccaccaccaccgctagaacccccagtacaggcccctcgctcggactttatcacgtgtacctcttcattccccttggcgatgtatttctcagctttcataccaaggtgcagagtgacatgtgctctcctagagcgtctcagcatctctgttcaaagagtagttttgtgatgggaacgccgagtaaaggggaaaattgagcagacaagaggctgtgggtttatcctccataccggcagtgatatggtgtgaacaaaagcaagtgcgccaatctgggactccaaactgaaacttcagaaaagaaactttggctttcatactaaaccgagggttttgccttctgggcctccctaaaatgggagcacgtgggcctgaagaggaatgctggctagcaagatagcagaagataagaaaaagagtcgcttgtacccaatgtccttccaggtggtgtctcctgtctgatcagtgaactcagagtctagcaaatgtaatgtcatcttcaaactattagcacttaacttgtaaattcttataaatatttgtgacctttctggtacttggtagagattccagttgttgctctacatctttaggatactagcacacagagatgaacttaattacattattttaaccacactggaactcggggataaatgagattataccacataagaatggagacactaacagtgctcagaaggaatccggtgaatcacatgctgcttcaatcttgtattcaattccagagggaaaaggagaatgtgccaacagactttgttataagctgaaatataaacacttttgatgagttttgtttctgagacattcctcttaaaaagcaacgtaatttctggtccttatgtaagttgccaacattccattgtattgcatttcaacaatcctgagttactagtttttgagaaatgcaactttgaaatgtgtaattaattatacatactcactgggctctgcagcatccactacattttcttggaaattttatattctgagagtgtatagttctccactatagtttcattgtatgtcacagatttttaaaaagctctagatattttcatattatatagtaagcaatttatggacttcattgccatgaatgtgtgagttgtgctactttgaattctcaaatggcattgttgctttttatttctatttatttctagtcattttctatttcattttacctattttgataagtaagccttttaacaaatctacaattctttagaataaattcaattcgtgctttgtagtctatgaaactataacctttacaacattattgaacatcataagtgatcttaggtactttcaaaatggaataatctaaaataaataagacaagcatggacattatgcacataattggaatgttatgcaatgttttggataattatgtatgtgagaaaaattgtatattgcagctaagtatctggatgccttttctgccccttggagatgctaaataaattctatgttgtaggtctgtgtctgaactctgacatgtggcatgaggttagattaagcctcaagactgaatattttttaattaacatgattgatcctttcaatatgaaatttgtgttttatatcaattatctggtcccaaatgataagtatcttaaaagttcaaatattatatgaattcactataaatgaattatattgtatgtacattgtaaatatacattaagggtatttggcaaggaaactggttgtatagtgatgtatatatgcttaatagttatgtcagagaattaactttcaaaggcatcttaatatatctgaaaaaatagtacttccctagagaaaagaggagagcaacactaagacctgatgcctctcccagttcaacagatgggaaggcagggcttggggacagctggggaatagaagctaccactgccaccgttgggtccctacttcccagccaaattctgtcgctaccattgagattcaaaatgtctcaagccccaagacccagtttgttccctggttccaattttgaggcagtatggaagataaaataccacaccaagcccttacacttctcagtccagactcaggagtttcagatcaagactacatttcctgtgagctgactacaaacctgaatcactaagaaccatgttattaaacctatttccttctttctcttgaaacttgggttccctttggatcaccatgtggcagtagtacctaatttttttttaagcaggtaacaacttaaaccccttatctaagttcttgagaccagaagtttcattttttggatttttgagaagtggaggatagaatgtttgcatatacacgagatatcatggtaatcattatgaacatgagattcatttgcttcatatgctctttatacacagagttggatagtacattatgcaaagttgtaaacttttctgtacatgagaaaggtttatatatttcagctaagggtgtaagaaatatttccccccttgagaaggctgaataagttcggtattctgtacctgtattttggactctgaactgtcatatatggtctcgtgtggaattttctgtttgtgacatcattactggtgctccaaaatatgtcagattttgtaagatctaaggtttggggtttttagagttagagatgtttcaccagaccaagatggcttaattaccatgtgactggctaatcttcacatctagacttgtactactccagctcctctttgtcactgaaatgaaagcacagacaggttaagaaatgtacatagccagtgacctggaaaagagctgatactgacctggagaagtttgatagcagcaccatacatcaagcgcaagtgctcagctgaggcaaaagatggggccaaccctcagtgagattgtagcctagaagtggggagaaaagcagacagtgataattctacatgggactaaagttgtgttctgtgtgaccacataacaggccaggggcgggcggggggatgaatagaagagagccaagcaaaccaagcaaacttgccttgtaatacatggaagacagatagcattctcaattctaaagttactgcctttgtctttggaaaagtaatctcctttggcccaatcctgttttcattcttcattatatccaaattcctccaggtggccttctggcttgattaaatcaacatcacagtaagtctaatcctttctctaactctactggagatctttctgacttgaacttatataacagactcatcagagatatgtctgtgttctaggaggggggtaattacagagaaattctgctcccatacagtggctggcaaatttatgtacaggtaactacatcctgttagactggagagaaatcagaagtgccactagaacaagtaagctgtgaatgggcaattttctcttcatttttattatgaaattttcatgcatacaaatgatgactatgtatttatatattcatataatcgtgtgtgtgttgagaaccactgccatagagaaaacttactagcttgctcctcatggcttgctcagcctgctttattataataaaacccaagaccaccaacccaggggtgtccccacccacaacatactgagccctcccccatcaatcacttgcctgcagcccagtcttatgggcgcattttctcactcagagtttcctcctctcaaatgtctggctatagctttgtcaggttaacataaaactatacagcacatgaaataaagatccctgaactctctcacagcagtcactgagaggttgttctgaaccctgttaggtcttttcaacttgttaaataccagatccccaatttcttcctcattgtccaactcctatatgaggctagtaagggctcttcagaagagcctccccttgctccctcctcaaatcccattcaaccactgaaatgggccttagctaaagcatgcatcttatcactaaccaatgctgccaaatcctttctgtctctccattctaaccagggccagaccctagccttcgcctactcatgagcaggagatgcctaagatcctgtcacatatcaatctaaaccagtctaaacccaatcttcctgatgttgtgactctttattgcatttcttcatgttgtggtgacccccgaccacaaaattattttcattgctacttcctagatattttgctattcgaaatcataatgtaaatatctgatatttgtgatatctgatatgcaacccctatgaaagagttggtcctgccccaatggggtcgagacccacaggttgagaactactactctaaacagctcttgttacaaaggaatggtcaccgagctgacagttgatccttttagaagccaacaaaatttcctcacataacctaataactattaactcctgccattctctcaaagatctcagtcagcgagcctatcttactccattacccttccaggtccaaaccttccatgcctgtctccttgaccctaatatttccttggaaccatgccctatcttcatctctgccatttcccttccagctcacactgttcccatgcctcaaataccttgacattcatcacagatactaaccattctctcaatcccttcatgccagattcagtcacctcacttacagacccccaagccccagtttggtttatagaaggggctaccgaaaattacctccctattcctcagattattccatcatccaggaccaccccaactctcacaatacaccctcattaaagatagccttctggtcataggtaccatttctcaacaagccaaaccactgcctttaaacaagccctaatactgcctaaagatctttctgttaacatatatattcatactcaaaatatgcatataaaataattcatttaaatattctaatgtggagcaaaagaggcttcctcacccaaaggggaccccagtcatcaatctctcagctgtccaggaccttttgactctgtcctttttctgtccaatacagcagtaatccatgaaaaaaaaaccaaaaatacatcttctctctcaaaacagaacatgctgatgaactatcccccacactcagaccttcatctgccctttctctcttttcttacctatcacatcccccgctcttatcccctcccccaagttttctcacacaaataccctttgtttcatctatctaatcagaccctaatttccatcctacaaaattatgaataaaacagtattatccatttttgagattgacagattcataaagcctcgacagacacttatggttaccaaaaaaaaaaatatatatatatatatatatatatatatatatatatatatatatgcatgcctctgtgtgtgtgtgtgtgtgtgtgtgtgtgtgtgtgtgtgtgtgtgtatttatcattgataccttctctgaatgggtccaagcattttctactactcataaaagagtgctcacatattcattacagaacttattccctgattaggttagtcatcctcagtacaatcagataacaatccagaattcacatcctctatttcccaaaatattttaaattacttaaaagtctcctagatgtttcacactccttattactccagtcttctgtcaaggttgaaaggacaagccataatataaaaggaacctcataaaacccaccctaaaattaatatagagttgggctaaactcctggacctggcattgctcaaattgagagccttacccaaacaacaacaagacaaactttggggatcccaaagacttaaaccatcctaatctagctaacttaaaaacacagttaatcagtactgtctcacttctggataatcaagataactccaattgtctttaacatgtgtgaaaggaagaaatgaacattgaggagccctgtattcacacatacagtgttggtcagtgatacactgtgcagtgagggacttctacagctgcagcatagaaacacggtccccagggagactggatgaggcacttcaccaatacaaaagcttattgtgcccagagatgaaagaatttctgttttcaaaatccaaggctacatttggaataaaaagatgctttctcactatgcagctaccctagacgctactgaaaatatcagggacaatggtaaggtgtttaaaagctgaaagttcttgctgacaggagcctgatatatccgtctcctgagaggctctgccagtgcctgacaaatacagaagtggatgctcacagccatccattggactgagcacagggtccccaatgaaggagctaaagaaaatacctgaggagcttggtggtgtttgcagccccataggagaaacaacaatatgaactaaccagtacccccagagttcccagggactaaaccaccaaccaaggagggactcaaggcttcagccacatgtatagcagaggatggccttgtgtgacatcattgagaggaaaggcccttggacttgtgaaggctcaatgcctcagtgtaggggaattgccaggacagggaagcaggagtgggtggattagtaagcagtgggagggggatgggatagggggttttcagaggggaaattaggaaaggggataaaatttgaaatgtaaataaaatatctaagaaaaaagctgaaatttaggaagcagttcaagtggagcctgagataactaacatttcacttcgcttggtagcaggtctcaagatgtgtcgttgtgaagtgatagagctggcagaatgccactaagaaccgttggctacaatgacagagttgtgggtcgtgacccctttggcaaacctctctctccaaaactgtttacattataattcccaacaggagcaaagttacagttaggaagtagcaatgaaaataattgtatggttgagggccaacacaaagaactgaattaaggggtcacagccttaggaaggttgaggaccactgccatagggagttctctacaacaaaggtacagtccttaacccttagactttcatctcaaaagaacaaattttgcagatgtgataggatgaaggagatccctacttacttcatacttgtttcataattgcttttctgaccgagtttatctaggactactgtatttgtgctattaacaggtgccttatctctgccgttagcattcacaagtggcagttacatccaggaaccaactaagcttgggatgcagtattattttcatttgggcatagtggcttccttggggggaggatggtatctctgagtgattaccccagccctgtcttttattgctctccttccaattcagttccataaatgactggagtcagccaaccaagattcactcttagtgtatttagaattttgtggcttatatatttcccatattgtaaaaaaaacaagcagaaacgaagtcctgtgtgctgtgagtgtctgtaaaggaagtgtagcacagtgaatactggacagagaggaaaccccaagaggtcatatcctcacggttcctttatggagctggggctgatacctaacatattttttagtcagatgaaattttctcaatgtaatatagtaggaacttcatttttctccctatttcaagtatttttatctttttgagggtcaacaaggtaccagtgtgacaaggtataagataagaaatggtctctctgaaaggatggaccatgtagagactgccatatccagggatccaccccataatcagcatccaaacgctgacaccattgcatacactagcaagattttatcgaaaggacccagatgtagctgtctcttgtgagactatgccagggcctagcaaacacagaagtggatgctcacagtcagctaatggatggatcacagggctcccaatggaggagctagagaaagtacccaaggagctaaagggatctgcaaccctataggtggaacaacattatgaactaaccagtaccccggagctcttgactctagctgcatatgtatcaaaagatggcctagtcggccatcactggaaagagaggcccattggacttgcaaactttatatgccccagtacaggggaacgccagggccaaaaagggggagtgggtggtaggggagtgggggtgggtgggtatgggggactttggtatagcattggaaatgtaaatgagctaaatacctaattaaaaaaaatggtctcaagcccaaaagattgcagcctaatgggaagatgtggcctacagataaacatgtgataatgtattatgtacactgataggtgcaaaactcatgaagtaaagaaatgatagagggggcagtgtgtgggagtgacctcagtgtgctttgaaggataaaggaagttcaggtggatcagtggaagaacttcagacaccagacacatgggacagtgtggcagagctggagcataaggtatatagagaggaatggagcagctatgagtaatattcagactactcatgtgatgtgttctccatgcccagccatgttagagtaaaaggcagaggcaatccaaaaacctagccataaaatgcaatgcagaccatacatggaactttgaatttcttagaagaaacttaagcttcttaaaaactctaacaaatatgattttgcattgattccaatcacatatttggtgaaatatccaaaactgtcatctaatagatgctcactattttaaagtatagcaaatttaaaatgagaagaaattatttctttttttcatacagtttccaagatcctttggggagttgtgtgtacagcacatgtctgttcagccacagctcaagtgccaggtagcttcgtggtatctgagtaactggacagagcagcttgagataaatgcagatgaggaaagggagggaaagattgctttggttttatccctagcacctgtcttgaagtcatatttaaatctcaagtgatagtatagtttgttgttctctttgctttcttaagtttttaaggtttatgtctgtagccctgtctgtccaggaactagctctgtagatcaagctgggctcaaactcaaccctctgcctccccagtgatgggattaaatgtgtgccccaccgtgccagcttttaaatcccaggtgttttattagtactctagcaacaaagacaagctcacatgtgttttcttattatgcttcctctcctctgcatgctttcttttatgtattctgccttaaggtgacaggaacagaaaaataactagaaattaacagcagagcatgctgccctaaaacccacatccggcccaatgcgatctgttgccctaggcaacactggttgtcaacttttattttgttttcattttggttcacctgctagttcacaagcatgacagcaataacagaagctattcacttgctgtgtctctccaccccacaaatgcactcactcccttctcaggcaaaggcagagtcggaagatttggggtacagagctggagacacctatggcatagctttaaaaagttttggagtgtggacagcaatggttctctactgttcagataatggagcctctgtcctagaaactctatttacaaatgctcaggaagtgtggtggacatgtgggatgtaggtatattattatggccttaggggtttgtgtgtgtgtgtgtgtgtgtgtgtgtgtgtgtgtgtgtgtgtaaggagaacataataataaaaaactaaaacagggataataaaataatatatggtactaaacacacacacatttttagtttccctctaaattataaccaaactgtatttacttgaatgggataccatgttaattgcctcctctaagagaagtcttggcatttaaatctgaagtgtccctccaggctcctgttttgaatgctgagccccaacctgtggtgctctctggagacctctggtgcagttaggaagtaaagcttagctggaggaaataaagtacagcccaagtctttgaagctatgccaccctgatcccacgctggctgtcaaatatcctcatccagattcactcaggtgcctaaacactggcagcttcccgttggaaatggtacaggctaaagtacagagagtggtcaacattgggttatttaaacctgtttaaatgaagaccagaccagagcattgaaataagctgtatgaatattcagcagaagtacttggaatagcatccaacttgtttgaaactgttggaacaaaacaaagtgaaaatgcattcccctagaaatccctaaaaataaatcaagtatttttcctgtatgtgtccatatttgaaataatcctgtattattcagattcttttcaattgtgaaacacatctttcatccaaaggatacaaagtagaagataagaacatttctattcttttacttcactctccttgtttagcaatggcagtgaaaactggtatactctgtgggagacaagtttcaggatcccactgaacatcaatattcacagatattcaagtcctctacctaaaatggtgtagcatttgcataaaacatatacacacattttttttcatgtattttggatcatcttgtggttcctcaacatctctactaaaacatagctgttataggaataacagtgacagtaatttacttagggagtaataacaaaaggaagtctgtattaggtgtgtatactggtaatctctgcactcagaaacaaaggcaggaggatggagacttggaaactaacctaaactatgtgtgtgtgtgtgtgtgtgtgtgtgtgtgtgtgtgtgtgtgtgtgtgtagtagcaaaaccctatctcaaataagagagggaagtgtggggaaagggagaaggagcctgtatgtgctaaaaaaaattattagtttttcattttgtgcagtctctgacttgtctactgttataaccccctgtagctggtctttgctactttatatgttcttttctccaccattgatcccttcagttcccccaccccatcactagataggagagaaagaaggatagaggtggagagagagagagagagagagagagagagagagagagagagagagagagagagagaatccatgaatctaaatttctttcattttgttgcttttttgagcatgactaccaacgaacctcaggcaacccctctgaacaaccaacaacccacctcttggggaccctagcatttatataccctctgaaaagtccccagaattgaaaacatcacacattcacagaaactatccgcagctggcaaaatcacacctctgctagagcatgaggcaaaccatagtcagacaaaccatagtcagtctgaagcagcatcatatcctacacctgggattaaaacagaacagagttttatagtgtttctttgtttttaaaggaaccaagtttccagaattgtccgtccatccccctccaatcactgtcttttatccacccctactcctccaagcctcctccttcccagagagttgccgctggtttcatgtcttgtacaagtggctagagcttctgtgtgctcttgatgcaacgaccatgtcacatacagaagacaagatgtgctctgctctatcctccaggtcttatagtctgcccgtctctccctcttccataatatcgcctgggccaaagagtaagtgacatggctgttccatttgaagtctgagtgttcatcatccttattctcagcattttgctggtttacaagtctgctttgatcactgctcacttctctgttaagactaagattctgtgctagtctatggatataaatgtgactatttagaaagtagtttaacaccatgcctatttagcaaatcagcaattatagtttccccatatgacctgtgacctctctggccatcagcttttgagtgcatttacagtaccaggcatgtgttacctctcatggaagtgggctccagatccatgcagcaagcagttggttactcccagaacagtcatgctactgttacactgggcatatcttgtcaggaaagtcagtattgtagcctcaggacctcccactggtcaaattatagatgactctcctctcctaacaccttgcctagcaccctccaacactaggcatgctcactaacagtaggaagcctccagttcaattccagttgatttcattattaacgcaatttttttaataagtattttcttgaacttggtgaaactgtcaactggtaaaccaatccaataaggacagtcacctataggtgcaaagttaatttcctgctctcttagagcaaagtctgattgaagtgataagacagggtgtattaaagtcataacaagctaaacaagaatgtcaaaaggtacagctgataaccaagcaaccacttctaaatagctttgtttagaaatgagaatggggtttattttaagtgatctttcccacatgcagtgtaaaactactttggaaggcacagaggaaagaaatcaggcttggagcctgttactttctcagaatttagtgaattgaagagttgttctctaccaacaatgggaactcaataattttcttaaaataactgatctgagactactttgatcattgtaaccattttcttccacttttgggactttgatacccacaacaacatctgtgggtaagtttagcccctgtgtaaatcatagtctattttctattctcttgttatgtatttttaaatcctttgtcaagccctatggagtaaataagaaatgaaacttctaagtcattaatcttcccaacttgattttccattatgaaatgaaaagcttggaccaagttaaactctacccactttgctagctcttatcctttgacatgtatatgaaggcagggttgtccagagagtgaagtctttgtgtcacacacaaggtcccacagggagtcagatgtattcatagtgcatttccattgcagaaatgtcaaaacaaaacagcacaacggggccagtgaggtggctcagtgggtaaagaatcagaagtatgaaaagggatccgctagtcacaacctcaggtacccactgcagctcttagaaagtatctgctctgggacactttcctgtaagctgatgtttagtaagaggaggaaggtgggaatgaatttggagcaatgtgctggggatagattgtggatgagttcatcatagggtttctctgagcatctcttctagccagcttgggagatgtgaagttgacctatttgtattgaggcagggctgccctgctatacccatatgctgggactggaaggaaacactagtctctcctttcctgggtccttcaccatcagttcacctttctgaggctgatgtacatttgatggatctagtggttgcctcctccttctgacctccagtgttcagattgcctactgacctggcctctggggctgagccacaatatcaattctgatcatcccagagaaaggcctcaagggacagtttgtctctggtgaatgctgaccttgaagaaccaagcaatctctccacaattgataccacaagagaattattttatttttggctggcatctctgctgcagagttttatttgtgctacttaggagtgtgctgatacaatgagctgagtgatagaatgctgtagaatggctttaaaagttttactaatagtcaaatgatgagatgcagagaacccagtccacttagctaactgaaatgaaaatataggccatatatttgtttacgatgagcatgttatccacaataattacctgtgttggtactttctatttaaagtatgaaaattgcatgttaagttttgtgaaacatgaaatgcataacttctagaatttgttttcctttccgtatctgctgattcagctctttgggaatgtaggtgttttgttgctgctgcttctgctgctgtttccagtgcttggagtaaaactcagggctctgtgcatcttggagatttgtgtatggatgtgtgtgtgcatacttgtgtgtgtgggggggggctttagctccattttaatttttgtaattttaattacaaaaaaaagcctattaaagcctgtagcaaaggcatgggattagattttcatgatgttaaatgaaacaataattacttacaataaaattcccaaaccataaacaacttaagagaaatgtatcatttggtctcaaacctaattaaaatcgtttgtgctacagtgtcttcaaaaaagcaggaagaccatgtagagaatgaaagaaaacagaagtcatatctctaagaagggacaactgtcaagaatatttaaggaaatcttgtaatgtaaaaaaaaataaagataatctactttaaaactggacaaaagnnnnnnnnnnnnnnnnnnnnttaattgctatttctcaaaaaaaatagggataccaatttaaatacatggaaatacgttcaacatcataagagaactgcagttcaaaagcagtgagagatgtcatacccatgaggacagctgttctcaaaagacagaagacatggtagatgctgatgaggccctggagaaataaggatcaacctaaatagccataaatgatgtaaaagaaacgtgcttccagtgcatattataatttggatgaactttgaatacattatgctgagtgcaagaagctagatacaagaggacaaatactgtatgattccatgtgtataaaaagcccagagtgcacaaactttctctatcaagagaaagtagctgggtggctgctgaggacttgaactgtcaggtgaatgggcagagtctcttttaaaggggaagaaagtgttccacaattagattatggtggtagttgcacaacctgcaactgtgaaaaaatccattgaaatgtacactcttagtagacgaattttctttttcatatgtattcaaggaaccactgagaagatgaaaggcttcagaagcaatctgtgcccaggctcagcacattcaaagagctgggggatgatattttaatgctagttattaatggtcgaatttatgaagagggcaggatggacatttgaaaggtggcactgaagaggttaataaagattagacaaaacaggaattttaaaaccacattgaaaagtttcagaggaaatccctcagttggtagagatagcacaaagctttgctaagctaaactgggtttaggaagaactctgtagtgtccatctagctgatttaagagggggagtctatcggtatggagacaaataatatactgataaaggagccatgataatgtgtgaagagggcctgtaccaagaagggaaggagtaggacaagattgggaaggctagattgacaagacaaattaactatctcaaaagtaggtaaaaatgcttaaaagaagtgcttgggtctttatttagtcaagataaataaagataacggtgtgatttgtgtattttattttatgggttgaagaggttatctgaggaaagggatgctcctgtgtaagtggttctggcctgcagctcagctgacaatcctctgcctaatgattgtaggcaggcagaaccgtggagtcagcctgctagtgttttttctcagacccttttcttccttttgtctcatctgcttcctgcatcccagtataaccttctgtctcagatcctctttctgactttctcttcagctcccaagataacctcaggcttgtatcttgctagaccacaagccagggagattctgtgtgggttggtgaagaggctggtagccatgttacatctgagcccctgctgggatgccctcctagaaatgcccagcatgtaggaagtgtaattacaggcttaagagtgcatctagagaaggaaccttagatgactaagatattgtacccttgcccggcattggtggtgctttaatgccagcacttgggaggcagaggcaggtgggtttctgagttcaaggccaccctggtctacagagtgagttctaggacagccagggctatatagagaaaccctgtctcgaaaataaaataaaataaaataaaataaaataaaataatataaaataaaataaaatatattctaccctcacactgcaataatactagagaacagaaataactgtaccataaaacaagaaaacacccttcagattacagctaaattaactattttaaaagagcaaacttgttggcacattgactttagaatgtggttaaagctgtatcattactaatatttgtgaaacatgaatgtctttaactaagccattgtcaagagagcccccatcagcaaaaaggatgataaacagaaccaaaggatttagtggactgtcatctgacatttttactgaggttttatctggaatggtccatgaacacttgattaaaatcaattaaccatgcatacctcccagttcatttccccttaggatccgtaaaaaaaaaaaaaaaaaaaaaatcaaaactgtattgtaagttttattattatgtaggctatatgtttattgtaatataggttagtataacctacattaactgtctcaattagatctagatgtcattgaaagttgttatactaaaacaaagtgttagggataaaattagaaataaaatctacaatatgctacccctaaattaaaattatctattaaaattgtcttttattttctgattcagattctggtaaaagtataaagctctggtttctttgatgtccttgaataagtttctgcgttctcttgtatcccattctctattttggtcctatgctattactgttcaaatttcatgatcttcttttctccaaaacctcctttgaattgcactatgattaaattgtaatatcctcccctacttgtgtgtgtgtgtgtgtgtgtgtgtgtgtgtgtgaactcctttataacctagaaaatagacccacacacccagaagaaaggtgattgccattggtttcgggtaaataccctgtattgagttagaaaaaatagcatccatttcaaccttactaagaggatttttaaaatcagcaatagctattgattattccatcagccagtccatttaaacatcaaggtgatcatatattgagtcaccgtataccgttttgatttggttctggcttttgagacagagtttcatgtagcccaaagtgcctttaacatccatacatagtcaagattgaccttgaacttctgatcctcctacctttgcatcttacatactcaaattaaggttgcactattgctaccagagccttttaatattctaatttagtggattattctaatatatttcacaccaatcagctattcctatattcatcaatagcacatactattataatgggtaaagaaactccactttatgctagatatctgtgttggtaccaactagtcagttgtctctgaatctagtccctggaagatagttcacagtaaccgagcctcagtgacccttaccgagaaatgtacagtcatgaccacctgcctgttatgataatgctaactgctttttatagcttctgtaatttatatatatatacatatatatatatgttaagtacatgtgtgtggtatatatgagtgtgtgttcattttcctatgtgtgtgcaggtgcacatgtgtatagaaaccagaaaccagtgtctggtgtcttactcaactgctccccaccttacgttttgagacagggtgtctgagccaggaaccaacttattcagctagattggtgggctggcttctatccagcactggagctgaaggcagtgccgccaccacagctttaacgtgggctctggaaatctgaacttaggacttgtgcttatgtagcaagcactttaccagctgagccatcctcaaatccctttattttattcatgatgctcataagtaatatcaagaggctgcttttaattttcagactgcttttcaaaataacaactctagtcatgtcatgttcagtctctccaaaagatacattggagttttttagagttagattttaaatatttattctttaagaatttcataggatatattttgaccttattcacctttcctatttcctctgcccccattcccctcccaacttttcctcctcctcctcctcctgctcttctcataactcagtgtgtgttgccctgatatgcagggatatggaagcaaccactggacacgggcaatctaacagggggcataccccagaagaaaactgactcaacacaaccaattaccaacagtcgcttggctatgagttagaattttctaacagtgtatttcatctgctcggtttactcagggatcagtactctggtttccaggcttccttcctatcttcctatttttttctcaaatacttgatgatctttggttgttacttcatttcaacggaaggactaagataacacagaaagctgcttggattttctcagtggctgtagctagtcatcttcttgactaggagtccaggcacagggctctccagatgatcatgcaaatgtgtagacaggcagctcttcccttcaggttagaaggtggtcagaccctcaactctcattgagtgctatttgctgaagccaacaagccatctgtcagaaatgagcattaaggtgctaagcacatcttcccgagatgttgacatttctctttctgcttttcttgattgtgatcgattggcaaattgatggattggattagtatctgttgtgaggtcccaagctttttgggcactggttacttgttttgagggtcttgagaccagtgtgaggaaccaaagaggtacttctctgtactataaggtgtagattcagtggatgaacagctgttactatcctttgagttcgaacgtgttattttgtcattccagtggagagttaggaacaagcacaagctaacccaactgtcggaaactggaaatttttagtctatttcagacacacagccctctattgcaagtatcactattgccagggtctctgtgtagtcactactatgaatagttactgtgcttatgcaattatcataatttatgaatcaagttttcctgtcatcattttacaagtgaaaaataatgtgggttttccccaataacataagtaagttaatcaagatcatggaatagttggcattgaacccaaatctgacgcactcagctaccatattcacactgaatatgtttctgatgatagagtagctcccaggtaccatttgaatggttatcaagaataattgcaagttcttaattcattgcttttgttttgttgacacataaattaaatatataaatagctttagtggactaactaaagcagagaactctgaaactctggtttccatttaaacctggctttccttgaagctgaaaggagataaatgaaaaggttgcatcatagactcgagagaaagaaaaacatagtcaaggaacaaatggtctcattgtccacttatcaaaattcccctttaagaaactgtgtgtaagtatccctcacaaagtaactgaagaacctcaccatggagacgaacagataagcttctttgcttcatagattggctcatgttctaattagctgttacacttcatatataagtttattaaaccactatgcaataaaaagttactgtggcgctcaaagacaaggtcattcttagatagttggcttattcaaggatacagacttctacatgttccatgacaaatatctcataattgtgaattctagcatgtattctatactgtgatgatattattattaactatatgattaataacaattgtacttcctgaacctcctgatggattctccaaatgacatttttaaagctaacattttattgaaaaaattttgttcattttttgtggttctctgacatgattacatatataaatgccattcataatctacctggagtatagaaatgaatttatgaaggttctaaaaaataaatattgtaggatattataaagacagtttatatggaattaagttgatcataacaacaaagaaaaacaactcagaataaaacacagtatgttatgaataattttcttgatgtttaccatctgttaggtgtctaaatgtactatttttatgtactgaattttgacataaactgaccatttaatgggcaattttatatatcactgattctgtgcattactgaacattgcacacacagcagagctggcttgtcttagctccccaatgtctggaaagtcctctttggaaaaaacttgaacagcagcatcagccctttttacagaccctcccagtgtcaagttttctagccaggctctttgtcagaacccagcgaggtgactgtcacacagtcatatcctgtctctgtgtcatactgaattctgccccaggagtctatgacctgctcagtttcaaaggatatgccttggactggacttagtctctcaacccacgggagaatcagggttccagtactcaggtatgcaaggagtcagtggggtgacaaacagacacgaacaccagagagagtgttgaatctgagtgtaatttctcaaagtgagcatcagacttatattacagaagaagaaaacaaggaagttaagtgatacattaaggtcatccaaggtacactgaggttgcccaatgcaaaatgactctttacacaaaacagaggaatgcatacataaaagataacaggaactaggcagtgtttacaactgggataaaatcagtgtttacaactgggataaaaaacagcctcacctaaggtcagcttattcttagaagccaggggcaaggacttcctgccttctgatagttaatccaccttctccctaggccattgtaaattcctgtgtatgggagtgactcagctgttattctaagtatttactctagttccttctcagaccacaaccttccttcttcctaggccattgtaaattcctgcacatgggagtgactcggctattattctacattgactttgtagaactagccctgaggtttctagctcttctccaataaattgtaatgcctgatttcttttactatctctctgtcaacaatggaggcttttcatctgaatgagtaccatttttacaaaattcaaagtctaaggttggctcaacgatttcctaggatattggaacactggtggaggctaatctaacttagctatatgtcaaatcattccttggagctgcttataaaaaaacaatattgaaggaaagcacacagatccattcactgtctcacatagggataagtttggaacattcatgctacagggtgccaaagctccaggagactaagtttccatgaaattctgcctcagaactgcgtccaagctttttggcttgtcatgcagacttcactggagtgggtgtggcaaggatgggacatagacctatccacagacaatttcttaatgggagaagtgtctgattggaagtgtaaaagtgaaggattagaaaccaagtttaaaaccatagctactgtcatagttagactgtgaataggactctgtaagagtaaaggaaggagatactccatcatcctatagaagaccagcaagttttagcttcaaaactatacagcttgaggtgatgtatcatgcctttggtcctagcactcaggaggcaaaggcaggaggaatctctgagttcaaggacacctgatttacatagtgagttccaggttaactaggacaacaaagtgagactcagtctcaaagggaaaaaaaaaagttcatgtggttactcaagacaggaacataaatgataagaatgaacccaaatacccagcacataaatcataacacagtttcctgtcagcctgtgtacttctaagcaacacagtgtgttatggtttctagtgcatcttatgtcactgagacaacaaggagtatgaggggtgccatcttccttgccatcaatattaaacaaaagcaattttggtttggggtatattttttggttctcttggtttctttacattctgtattcaaatttctgtctgaaattttgccatctacccacaggacagcagttcttaattttgtatgcaacagagtcacttgggagtattacagtgcaggctattcaacctcctagcccagagtttctaatttagttgtttttagatgaagcccaagatttgcatttctaacatgtctgtatgattttactcctggtagttggagaacctgcatttgaaaaccaccactgtagagaaaatacaaaacccagcccaaagattagctctaacctcttcatatcattcagccacatggactacaggtgctttcttgcatcttgtacagtccttgtgagatttctgtgccataagtataaatgcaatgccaataatgaaacccattatcaccactagctaagaatcaatacagcaacaatttagcaagcaaatttgacatgatctttcatttaactattatgaaactcactgaaatggtcccttctcatggatggagaaaatacagttgtgttgaggtgacatttttttagcattgtatagtaaaaacccagatgaatatggttgtttcgggatgcaaagtccatatagatgacagctgtatacctgcatatatgcccaggctgctggtctcagctccttactccaagagcattgtcagtcttttctctctgctcctacctttgtgactttcatattgctgtgatagaatacctgaaagtacagttcaagggggagaggtttgtcttggctcaatctcagagcatttaagttctttatagtggttaccatgctgcagtgctaaaaactctcatctcatctctggtgaagggtctggtctgccccatgccactcagtgatcccctaagctgtggtcctctgatggatccatatatgacaataaaaataggagctatcacaatgtaccctgaaaaagctaacaagaccattttgggaaactatattatgcaatctttaaaattgtaattaatggattacctagaatgtgtgtgggcatgtagtaattcaattcctttcttgcttcaaaacaacagtattgtcagcagtatcttcacagagggaaaacagtatttactaagaaactcaggaaaagaactaaattgcctttctcactgagggggagtgatgcagccagtggtagaacagcatgtgtttagtgtacaccatcctagacacaatgtacagggcaggaacaacaaggacagaaacaaagaaacaaacaaaacaaaacccaccatctggattgccttttcccacagcatgttttacagaaaaatagtttatataaactagctatggtgatttaaataagaatagcctccacaggctcagatatttgaatacttagtcacaagggagtggaactctttgaaaggattagaaggattgggggctggggccttgttggaagaagtgtatcactgggggtgagctttaaggttttaaaaggccatggcttcacacgcctcccccacacctgcacccctccaccccaacttctgcctgtgaatcaggacttatgtctcagctattgctccagtgccatgctccctaccatgataatgatagaccaaatctcttaaactttaaggaagatccccattaagtgcttactgctgtttttcatttgctaatgagttgccttggtcatggtgtctcttcacagcaatagaacagttactaagacaccaactgaaatagaagaggcctttataagagaaattcaaagaagtcactgcgacagcggatgactgcatgttcacagagccaggttgtgattgttaccaacagcctcactcagggagactctagtgccagctacagaacgtcaaatgagacaagcaggaaatccctcttctcacacagagtcaagaagtggctgatattttctgttttatccttaaaccatgcttcacatcatttttctgaagagcacattttgaaaagaaagacaagttgtacatttccagcagtggaatggattaaacttcagtattgtgtgtgctcatgtgaaagatgcttggagccataaaataaccgaaaaaaaaatctgaatgacagaaaagatagcaatttatagttgcagtgttctcagagtcacctgggttatttctattatctcattcactttttaaaatcggtctggggatgacatgtgctgagcacatgttctgctctgcatttgagctgtagccccatcctgaataggttttgggtttggttggctggttgtttttgtttgttgtttgtttggtttttgtcaacttgacacaaactaaatttatctaggaagagttagaactgagaaaatgcctccatctgattgcctgtgggctagtttgtgggacattttttaaaaaattaatgattgatgtgggaggactcagccctattgtgggcagtgctagccatgggcacttggttttaggaggcttaagtaaggatgagatgagagcctggggagcaagccagtaagcagcattcctccatagctctgcctctttgagtttttgccttgagttcctggcttggctttcctcaatagactctgaacccacatgagccctttcctctctaagtcacttttagtcataatgttttatcacagcagtagaaacctacagcatctcccacatgactcaccctagcagatgttctgttaccaccttcaaggaaggttatctgaacacttggagtgacagaactgtcacttctcagctgacatctggagaacactcagcagttatcaaatgtaagtcctaaatgtagattaatttttttctggggacagggagactacactaaatattaggaacaacttaacatagtaacagtatagtagcaatgaagaactcgtgagcttcttgacaaggaatggggaagcttctacttctgcttgttgtgtcctcttccattccctctgcccgctcagccatgtactctcacatgatacattaggccaccacaagccagagcacaccaggatacaagatggctgttcattaccaaagccaagtcagagtcttgttctttactgtccaccttgtgatttatgggcttattaaagaatgtgttgtactttctctatgtcttgtttgatttaacagaaaagtttgtttcaatgttgaatgacgtattgttagaagtctgcttttcctgaatgtcagtcagcattggcttcgcaagcattactaatcagtaatattccatcatggatcagccagcctgccaacctctgttgaaaaggaaaattactttttgagtgcttggggaacctctgctgctttgatggtatggtctgtaaacagctgtctttcttgaatgatagctttgcactttcgtagcacatccttgtgagtctcaatgaagagcttttgaagtgatggttttgaatccaaatttaaactgtgtattattatgctaccgctggagttttctaaatttctcccaggggctgggttgtcagccactggcactactgtgaaagcatagactctgtaggaggcacagtcttgtgggaataagttaggataatagggcgtaccctggaaggggattctggacccctgcattttgatctttctctacttcctggatatcagacacaagcatcttcctctgtcacgtgcttctgttatggtgtactgtgcaaccacaggaccaagcaatcatggattgaaataccagacactggatgccaaatgaacccattttttattaagttgattgtctctggtatgttttttaacagcaacaaaaagctgattcacacattactaatatgaatatgataaatacgttagatggtaggtatctattctgttccattcagttcccatataagtatttgaggaaaatttaatcatatgtaacttctactggtggctaaatgttcatattctaccacatgagtcttcctgattttcagcagtactaaaccgtgacaatgggtaggtaagatagctcagtggaaaaggctttcaccacaccagctccctggagcccatatataaaggtcgagggagagaaatgactccataaagttgtcctttgaccccaaaactcaaatgtggtatggaatacccccatactctctctctgtctctctctgtctctttatatctctctctgtctatctctctgtctgtctctgtctctctctctccctttctctccctttctctttctctcctacatctttaactaacaatatatggtgggtaggagcacttgctgcacaaagcatgaaactgtgaaatcagatcccagcactcacataagtgctgatcatggtcccatgtatgcctgcaaccttagcactgaaggggacagggacaagatgagaacgtgtgcttgccaacttccaacctagctgaaaaaatatgagctgtaagttcagtgagagacactgcctcaaagaaacaaggacacccaacaaaggagaatatacccaacatcatcctctggcttctgagcatgcaaaagtgcatgatgatgcatgcacacataacatacatactaacacacacacacacacacacacacacacacacacacacacacacacacacgaaaaatctctttgccattagtcctagagtagtcttgtggcagggtttagccattgctgattggataaagtggtagtctcggctttatggggactgttacatagcttgaaaagtattttctgcctggtacagattgccaaagtctaggtgacatggcttttattactccaacaactgatgaagttgtgacttgtaattgttatggatctttagaaaatatcctctctacagcctggaagattaaaaacaaacaaacaaacaaacaaacaaacaaacaaaaacaaaacaaaaaaaacctatttgaaactaatccccaggctgggccattgggaattttactaggaagtattttatacagaggaaatcttttttttttttcactaaaaaatataaaactcaagaccaaaatctttaaaccttttcccctttttggactacacattttcagaagctatagcagaatggctgagtcgagtagttatacagaaaagaagttttttcttctttgtcacagttttggaggtgggggcttctgagttgagagatttgatgagagcatggcaggctacttgatgtaacatcacatagtgagacaggaattcagagagcaggggaggatcaccctggatcttgttacaactcatccttgtaagagctgcacccatcccttctgagggtgatatcccagtgagccaactaccttccactgtgccccttagagattccactatgtcccataatagcaacaatgaaaatttctccacacacaaatcttagaactttcctttaaaatatattcaataatattcttcttccttgtccacttcagtttgtagtctggcagagagggaaatttgcctctgaagtcttcactcaaaagcttgtgcatcccagaaagcacaccatccagacctaatcaatgtttgtattgtttgtctaaataaatttttacctttttttcatctgctttctaccaaggcttttatgttctcaaggccacagcagatcctgagctgagctaagtatggtctgtactagaggagagcactatgaccctccacgacaacaaccttgcctgactacccacactgacacatgccttttttccttgtatgtgaatgtgtgttccctgagtccttagatattaattcnnnnnnnnnnnnnnnnnnnnnnnnnnnnnnnnnnnnnnnnnnnnnnnnnnnnnnnnnnnnnnnnnnnnnnnnnnnnnnnnnnnnnnnnnnnnnnnnnnnntcacacacacacacacacacacacacaatctgccatgagtcatcatctacacacttatcttccggaaaacgtagtagtgattgaaagacaggtcatccaaccacgtgtaagctgtttgatcctagacatgtcactccaacttctgaccacacattcttcctctatgaaaatgagaatttccaaatctcacctggttttaataagaactagataaaataatttacaatgcccaggagattttttttttctttacatctacttatctgtctacccctcttcctctctggttgcttttacttaacttggttcttttttctctaaaaaataattttttgaaaagctaaactttcaacaaataggaacaatgaaatgatcacccataagtccttcacctaacatcaatcattgtttttacttctctatttccactgtctgtctctgaagaacataaagaattctctcacatgattcatatatcacactgtggcagctgcatacaaacaccacagtacaataatcacacttctttttctgacatataacctatactcatttttgattgtcttaataatagatttttattacttgaaaagttgaggcatttccccccaacactcagtgactgaagcaagaggattatgagttcaaagccaacccagactacataataaaaccatgtctaaaaagaatattaaaagtccagaccagttgttttgtttggcagaatgttcctcaaattggatttatctggctgattgctgactggatgtagagcgggattgccacttccaaagagttctatagtggagatgctgtgtcctcataatgtcaaatcactagcgatgaaaaattggatatctggttaatctgagagaagcctctttgggataattttcattttaaagtacctgcttggtgggcattaagtaatacgtgtgacatgattttctcaatctgctaaactctgaagagtctccttcaaacatttcaattctcacctctcagagtgtggcctggagaagtaacagtgatttgagtaaaggtcacattgcaccatctgcccaatgatgtaaacaaccattgtctattcctaccaccacccacatggtagctatggaatcattctctgctttaagatctattcatctccccagtaaccaggaatgacagcaagtgtctgaaatcccagaacccaggaggtgggagctcaaggatcataagttcaaagccagcctgggccacagaggaagccctttctcagcaacacaataaaatttatcttcttccctttttcctttcccagcttcttccttaacttactaacttctctaacatgtttgtgtaaagaccttacatgaccaagttgtcaccataagaatacatggatgaagaaggcagcctggcctcctgccttcagggagcttgctcatttaacagctattcatttgaccactgccataatctacattgttctatttactgggactgtaatagtaaacaaaaagtgaaccccacattgggcttacattctgggggtgggggaactgtaaacagaagtgaggagtggaaggtattggtggatattagaaaagaactaatttgagctaggtctaggaaggtctctgaactagggtggtgctgactagatggttggtgcttcaaaagagagacttgtgtggcctaacaccactcaggagctgacagcagttaccataccaggagtcagcaggaaagcctggggttgctgagaaggaggtgagtgtaccctgaggccagagaaagtaagaggccagggagaattgaggaggcttggtgagggctggaaggagaggctactgagcttagccagaatgaagttggggtctctccagtgtgaggctgtcttctgaaaaaacatagagcaaaaactatggatgggaaataaagaaccaaaacaaatagaacgtgtagtttcagtgaaaaacttaacacagcaannnnnnnnnnnnnnnnnnnnnnnnnnnnnnnnnnnnnnnnnnnnnnnnnnnnnnnnnnnnnnnnnnnnnnnnnnnnnnnnnnnnnnnnnnnnnnnnnnnnnnnnnnnnnnnnnnnnnnnnnnnnnnnnnnnnnnnnnnnnnnnnnnnnnnnnnnnnnnnnnnnnnnnnnnnnnnnnnnnnnnnnnnnnnnnnnnnnnnnnnnnnnnnnnnnnnnnnnnnnnnnnnnnnnnnnnnnnnnnnnnnnnnnnnnnnnnnnnnnagacacacacaccaacacagacacacaaagatacatataaagacacactacacatgtataaagacacacacaactcacacatgtaaatatttattttattttgggcaagaaggaaatcataacacagtttaacatgaaaaacactgtatcaagtaatttttaattttcgattaccagtcagctccttgacacatgttttctgccatcttaacttcgtgacctctttggaggaggatgggtttgaagtacaggtttagtaaaggtgacaggggatttaactgttcctctaatttagttactcagttcttttgtttggggttgtttattgcttttgttggtttggcttggtttagtttttggtttgtctttttaatttgtgtagttgtttggttggttggttttgagataagatcatttattgtatgtagtacagcctggtctcaaactccctatgcctccaaatgctgatttcaaactcacagtaatccacctgcctcactcttgtaaggcttaaggttaatagcatatattacatgcctggtgctaaattagttttaatgattgatagttcaataattagatgctttagcccctatgtactccacagtgaggccccacagcgaggccccatttgtaacttcctgtgtggtttcttattctgccaacccttcttactaaggagcaagatgtgagagaaccacagccctcaatcactacacatggccaagtacacaccactcccagggctcaggcagctgggctggaaccacacaggcatcagttcccagtcctcccaaagcattgcttccagctctcctccctagcacagaagatggagtctgaagcccatggcattcatcatagggaggctcccactaaaatctgtgtaacacggagatagggaaagcaggccttagccccactccaagcacaaggatgacaaccaggatgatctcccagagagagaacagtgatccacactgttcttcacacctttagaagagggttcatgtttctttgaaaaatacttttgctccatgatgggttgactctatggatcttgaaccctcacatatggagggatgacccgcaacgttaaatgctgaatctgatgatggaaccgtcgcatgtggtcatgtgagattcattggtaatcttgacccagagagtaggtgacatgtcaggaacaaaagttgaactggggtacattcagaaggcagcagaccaagtgtgagccaatgaataaacttgactagccccaggagttttgtttattgaacatcaatatgcctagtttatctacaaaggctgtcaataaatatttgctggatttgttcttcaaaaaaattctaaactgtgttacaattttgttttatgtcacaagagattcaaactcagaacagttccccattcattatatagacattctaaatgtaataaagggggaacttaagaaacaccccaaggtttagaaggatcttttcacactctgtatgttcaactgaaatgagtctgcaacctgtgtcccagagatccagaaaagcctttcagatgagaggatggtagagtgtggtactcctctgacctggcctggtctccttgtgctccatgatgcttccttgatgagttgtgttcagtaacttggagtctgattgaatcatctttctttttgcccctggggagcttggtctggctgagtgcctggctctgttcacacagaagcaggttggaagtatgtacatttgaaagtcaagctcctagacctgatggttcacacctgtatccctagcactagggtggtggaggcaggaggattttgaatttgaggtcagccggagttacacaaccagaatagctgaaaaattaattaattggtgtgtgcactcatgtgtgtatacacacacatatcctcttaaaactgtggtagcccatctcattgctcagtgtggagtgtgtgtgtgagtgtgtgtgtgtgcccacacacatgcatatacacatacatgccaacctcttgttctttaaagcagcctgtcagtatttaagttactgaacgaagtcatgccattcccaaatgactttctttttacaactgtttttcatctcactgtcccatgacataattgtgaaagtgagctgttgtgttggacgttggtacatgaccacacacagaagtacaaatgcagtgtccctgcgagtttcccctgtgacaagtgtggttagtctctattgtctcatgagcacagtgactgtccagcaatctcaggagctggttttcattcatctcaagcacactgtgcaaaagcaggtcaaacaactcccctgaattcctcttagttctttgtcaagttatattagtttgtcttctctgttacattggaggtacctctgtttcctgtttcacattaccttggcttcctcctctgcccctaaacattgcagcaaccttaaaccacgtgctgtgctgttctgtgaaccacttcctcttcaggagaagctttcattacattttggggagaaaaaaagaaattatgctgaaaaaaaattaggtcaagctcaacaatgtaacttgatcaccaaacatatcataaaggaacaacttcataacttctgctgacatgtgtgttcggctggattctgcactttgtatttcacaccaattgtgacaccagtcaggtgtgacaccaactaaatgtgactgaaattttttttctttttgagactaggtctcattatgtcgctgagactgactggaacttgctatgtagttcaggcttccctcaaacttacaaatcatctgcacccatttcccaagtgccaccatactgaatttcacggaagtagtttccaaaaaagtttgcttccttttaatctatctttgtggtatgttcagttgttccttgaaaagctattatcagctgcctatttttaaagcttagaaataatgaaggcagaagaaaattgttgctaagagagcctcagatttttaaatgttgtttctcattaattttaattatgacaagctgattatagactcaaaatactgttcacctgtaatgtaaaaaaatcagtctaacaatataatcatcttttttaccatcttctaactgcaaagatggtatgtaagctctaaatacttaatctttggtgtaggcccaggataattgcagttacagaaacccacacaggaagtcttacaggggttaagcctctaaccatgtaatgcatatttattgactgctcaaccttgtttaagcactgggtacctcagtattctcttttgtaaagtaaagatttatttctcatactttatgctatgaatgttttgcctatatgtataattttgtaccatatgtgtgcttggtgcccaagaaaatcagaagagggcactagattccctggaactggagttacagatggttgtgagtaaccatgtgggtgctgggagtcaaacctggtaacaggtgctcataaccagtgaagaatcccttcaacccaaagctacttcatttttactttttaaaataagatgtatcatctgctcatggcgttaaaatgagttaggaatagcatgggaacaattcagggacttttttttttcctccctctttttctcttcttcttcttcttcttcttcttcttcttcttcttcttcttcttcttcttcttcttcttcttcttcttcttcttcttcttcttcttctttttaatttttcttggttggttttgtacttttcagacaagatctcactaaagagatccatactgacgttgagtttttctttctgctccctgaatagtggaattagacaaacctgtatacacagcctgtttctctgtttgttctttcacggcaatagagacaaggtataaccatagagctcaaactggcctgcaattgactgcctaaatgctaagtgacagtagcctatattatttattaaatgacagcttagcaattgatgacttgtaaaactgattggcctggggttggcttagaaaagttaaacccctttgcagtgccagtcaagttgctaatgttctcaaagcaactaagacccttggcttaaagcaagcctgtagctgtgacagcagctaaaagcaggcatttctgggcctagcttggtggttgagagtgtgctttttctgtgaaccagttcataactgcaacagaggatctatcatcctcttctgatatttgaacacatgggacaacatctacacatacacatattttgttaaaaaaatacactttaaaaaaaaactgtttaaagtcaacttcctgtttaattgacctgacagtcaggaaagatgggatttgttaagctctaaggatcatcaggcactgccatgttgcatgtctgatgtggtaccacaggaaccatgtcaagcatctaggcagtgaggtggtagggagctttgtgtatagcttactagctggatggtagcccacatcttcctgtctgggatgggggttaatcagcaggacagtttggaagacataaattgtaagttctcatccttagtaactgctccctagtatttttagttcccagtaatctgaagagttctaagatagtaaccaaaggagtctggtgctgttatgtcaaaggctgtgactgcaggcttaaggcaggactatatgaactcttacataaatgccacagcaactctgtgagatgtatgctattattcctcattttgcagacaaggacactgaggcaccaggaagttagatgccttcttgaggtggtcgctgaggccagaattgactatatgctgaggacaaatgtccagtggttttactgacagcattgaacagttgacatgaaagctggattttgaataactcgaattttatgaagcataaacaaaggatattatttataaggaatgtatacacagagactaaaagaatgacacaaagtctattcatatggcataaagggccctgcatagcaagaactgagccttaagaagtgggtaggagaagttcctggaagattctgaagacacagtgggcacagagctcctccactcgctcatggtcagccatggaaggtattttaagcaggaatgtgacaagttcatgactgtgtttgaattcagtgcttatgctgtcattgaggacaggaagtcagggtgactggaagctggacgagcagatagatgaagctttcagctatggccacgcagtaagaatgagaggagaaaacatccactggaaaatccaacaggattttctgactcgccaggtgggaaaatggaagagaagaggatcataccaacttctaactcagactaatgagtgacaaatggtcacccgccaaacctggagtgttggggttgcagaagaagaaatagtgagtgggagcagtttgcatggaaatgcccgagggtctttaaaatggcttctatgggcaggtaggataatggctgctctgacttgattcaaaaccatggcagcatttactaagtaaacaacaatgaagactgcattcaaactgaattaaatgtgtgaagttaatctaagtatatgtcctgttgaacatatatatataaacatagtacttggattttcaaatatatgtaattgaagtttatttatgtgaaaaagaaaaagtctttggggtcaatacctgaagcttgagtttgaagctgaagagatagttgagcattaggaaaattccatggccactgagaaacgtcagtttagcctgaatgtgcccctcctccagcacacccttctttctccaggagagaagaatagtataactctggtaaagtactactccagttttcctttaaccaacaatgtgatattcttcccaaggcacaaaaagaacccagaaataacagactcatgaaaagatgttgactccacccagtcctggtgtgaacatggcttgttttgcaacgcagcgcctcattgcaacagctcctccaccccagctgttggctgctaaccccaataacacattcagcctcatggttgggcgttctctcctttgacctttggaaagtaccacacatgcacagcctcatgtcctcatacttgtgtgtgtgtgtgtgtgtgtgtgtgtgtgtgtgtgtgtgtgtgtgtgtaaatgtgaactgtctgtggctcttacccatccattccagaaatacggttttcttgaaggaaaggataggtgtgtaagatgattgaatttacagactaacaaaactttaaacctaaaaggaggggaaaagctcttaaaactatgaattctctactacactaaaatcctatcattttgctcactgaggcagaaggatcccaagttcaaggctagatagacaacacagtaatactcttgtactcctgaatccaatgtctgatttaccaaaaatccaaaagattttaaatgtaacttgttaaacgttatatttacaactgtatatttccagcagaattttgatgaggacatcatctgagaagccacatagagagtagtaggggcaggggaagagagagcagggaaaaggcagggacaggggtcaaaggggtgtgctgtcggtctgagttatttcctcttgggtgagtaacttgctctctctcattcgttacccagtgtgcatcagtagtgtatgcagactgagaaaccagagtctcagcctaaagggagggtgaattgctgagtcatagatgttacattgctttagtttagtgctttttccggtcacgggtttaagagagcgtatggatggtagatccttactacctatacatcctttgcttcctatgaattcgttgtaacgtagattagtagcttataatgacagccaatacatatactttatattctctgaataggttgttttgtctcattaatgcaattttttgctgttaataataatttatcagaaggattcctttaattctcacattgcctctaataaaataaacctctaataaaataaacttacatgagcaactgtgtaattttattatttattctgctagtttttcctcattaaagtaatgcatgaaaaatccattctaggatttttgaatagcattatatttttacagacaatctgttaaaacataaatattttattcacttacatattttcctccattttctaggaaatttgaaaagcaaagcctattagtataatttttgttgctataacaaaatacctgagtctgggtactttagaaagaaaggacatacattagctgatagtccgtggcaaggaaagtaagaatactaaagcccaagatactaagtactaaagccaagctgagacaatttgaaaagattagatactagttctacagggtggatatttggagaatattcacagattcactccccatctccccccaaaaaaggcttgtgtagtattatatcttctaatccagtcctgggaggcaaatgttggcttacagagagttttagtgatgtggacacatattactgttacagtcttcagtacatcatttttcttctataaactggactccttttaaaaaatcactggagttgttttttagaaacaatcaataagtagaacagtagttataaagagtcagaaattgaataaagctgagaaaaaacaaagatgttactacttaaataataaattgaagtcatttaaaaggtaaactgtaagttttcagaataaattattcttccttggcctagcctatttcagcaaaaggtttattattaaacaaatcataaagaataggattgtaattattgttttaagaatcttactattgttgggcctggtggtatatgtctttaggcccagctttcaggagaggcaggcagatctcttgagtttgaagttaccctggtctatataatgagtaccaatccagccagggctacatagtgagattttgtctcaaatgtattttgtttttgttgttgttttggttaggcagtcataagcttcctgataggagcgcttagaagagaactcatgtcctttgcaagagtactatgtgcttttaactcctgagtcatttgtccactcctgaagccatagattactaaagaaaaacatgtcagtatccaggtgcactacgttcctaggagttgttggtcagggaatcttctgaagccaaataatataagcaattgctactgttcttagttgtccagaaaacttgatggtaagaccacagtattgaatatttcacatattgtagtcatggtgtatagagaaatcaaactgaaactcatttagatgcttcctacctgctgaataactgtcatagcatcagaagtgccatgcaagctgctgagaaaggatggtcattggctgtcctgcttagctgtttactctgtctgcaacaatcctgctaggacaggcaggatgagtccattcgtgcaataatgacaagtctgctacaggataaccaactgttacttttctattgctgtaaagagactcatgtgaagagactccataggcaaggtaacttataaaaaaaaagcatttaattagaggcttgcttataagttgagagggtaagtctatgaccattggggaaggaagcatggcagtagacaggcatagcaatacagaagtagctgagagcttacatgttcagatgacaaccacaggcacagaaagacaggacagagaaacagatgtgcgcagagacagagacacagacacagagagaaacagagagacagagagaaaactaactagagtgacagagtagcaggagcttttgctcataatccttcccaaacacttggggaccaaatgtttaaacatataagcctttgggggccattctccttccaacgaccacacaactgctttctgattggacttgatgcctgttccacaggagggaattctgcgactacaaaccggagcaaaaactcatggctggaaaagtcatagatcctactgtggttcttttgccaaacagacaggatatgcctatcaaattgccttcgaattaatgttgctgtcagctttggtcaaacgtgtttctttattcggtggtcagcaattactcagaagtttaacaacaggtcaaggttattttaaaaataagactgtggaatgcccagacatctacatctccaagactcagggaactgtgcagtaagcagcagaaagaatgtaaaacctggaaggaagtgtggggattagaaggaacactgacgaagcatttagtgactcatacaatcctgaattcataacaactgtgattaactgcagatgatctgcacaaaattgaacctgtcaatatcttgtagtagaagtgggaaggcttcatgggacccgttctcccatgagaacttacacacatttaattgttggtaaggagggaaaatttcttcagtggtatagctaatggtaaagtacacatgttcctataagcaacattaatggaactcactgtgtcacacacatatattctaagaaaagattttaaaaagtaaaaggaaaactgggtgcatgcctttaatcccagcactcgggaaccagaggcaggtggatttctgatttcgaagccagcctggtctacaaagtgagttccaggacagccagggctacacagagaaaccctgtctcaaaagaaccaaaaaaaagtaaaagggagctatttacagaaaggaaaggaaagagattagcaggagtggaagggggacttgagtggataatgggggctgcatatgatcaaaatacaatgaggagatcatgtataaaaataatgagacctatgtttgtgcataattcatacatgctactgaaagaatttttaaaacttactcttttaaacctgacctgcatattaaaatatgtgtggaaaatagtgtttgtctaaaagaatccattgaaattacatatatatatgtatatgtatatgtatatatatatatatacacatatatatatatgcctagtcatattgatcattatagaagccaaatagtaagtacatagcaatcattctatacttatataacatcatttctctgcatacatgcatatgtccatatgaaaacagaagcacatatgtatacatgctcaaataaatattgttggctgaaatacagtcatccttcaacacctgctggatggttccagaaacctctatggattcccaaatcctagaatactcaagtactttagatttcattttatatatgtgtgtgtgtgtgtgtgtgtgtgtgtgtgtgtgtgtgtgtgtgtgtacacacatacatttttcctcctgtattcttagttatctctaggtcactgataacaccatagccacttatcagtcagcagtgggaataagttttgagcaatgcatgcttaggctttttgattgtcataagctcatagaatagacctacacaactaagatggctgcaccacctccaagcaatatgacccaaggacaatagtggttaatgcagtctgtccttgacaaaataatgacacgctgttggccattgcatgactatagttgctatatgggaaatttaccaagaaaaagttttgacatattcagtgcaagaattttttccaagtatttttgcctcgtgggaacaagaatggattcacaggtctgaccaaatacatactgatcctctatccacaccaggttgacattggtcttgtaatgtcgcgtagtgtttagaacccttgggaatgttcttgggggaatccttcatttcacatgtaacatacttcattcccttgccacactacaggctgccaagcagtccttgaagaatgaatattgttatctcctcatttttcaattcacccttgccaaaaaatgttaggaaggagagcagctgcttgcccctaccaaattgccttgctacattttatcataacctaacacttccccttttttggataattgtttcatttggtttaggggataaaagaaggctatggtgaaaaaaatcctttatttccattctttgctataccctggagcttctgtgtacttacaaataaatgtaccaaagctgttattatttcacagatatctttataaagtagggaaccatttggtaaatacatttaatcacaggtattttaaaatgcagtccattttagtgtgtttttaaatggatgtaaactctacatccctctgacctcatagtattacatcttaggagctctgttatcacagtgaccaactatgtaacaaaaacaaattcaaaaggagggaaaatactattttgactcttgatttcagaaatgttaatccagtttcttcactcaggcagattgtcacaatggcagaaacatagaagaacctgatcactccataatcaacaggaagcagagaaaagagatacagggagagaccagagcaagctataactgcacccaacatggacacacccatgatgacttacttcttttagctaggcccacttcctactttgcaccacttcctaaaagtattatcttgttataaataagtcaaggggctaatccattcttctctggaaacttcacagaagggtgcttcactaatctcactgatattccaccagaacaaatcaacaatcaaaaccatcgagagtggcatgaggccttctctccttctgataaaagaatcctatggcaaggtgaataccaaaacaatgtccactttgttcacttgacattaaggaccggtagtttagactggaaaaacaaattcaggatttatttgctctgcagcaggtcccaagatttaagcttaacctcagatatcaaattagaaatatccaaacatgaaattccaaggcatttgaggccttcttctccaagctgttctcttcatggattgctttattctgaaggaaagaatgaaaactcaacatgtatgccctgataagcttttagagagctctaacgtctctgtctcttcctgtttcagatgggtgaatcaaatgaagacatagaccagatgttcagcactttactgggggagatggatctcttgacccaggtaaaaccctctacttaacctgaaaactattgggggatggggtggtcatggattgcaaaatttgatacaaatgcttcctttaaaaaaaaaatgtcagagattagcaacatcatgtgccctgatgtaactatgacagtgttgggagaaaatactaaggcttctcattggttctgctcctcggtgctcatggtttgatataacgatcacacatacagggttatgtcagtgtctgtgtttatcatgtcccgtgaaggaactcccatgcttccttcaacaacaaactctgagcaacagccctagtgcttacctaccttcatagagaatagctgataaatggcactgaatagcatgcttttgtgtcaccctttaaggaaatactgtatttcaaaggcctcttgtgtgttcttaatgaactgtaaggactcagttccctctaggaagcatgaaagccactcagctgaaggctacatatctgagaaaagcagccaatagagaccagagtgactttatgtggcagttcatccagagcccaggagtcagaggctgactcaggtcacagagtcctatgagcttttctgtgcctttaatgttcttacaactgtttctcagtttctgaggtcactagactcatcacttccacatacaatgttaaactacagatagcacaatattctaaaaaaaaaaaagatgagagtgttaagatctcttcaaaacacatgtacagtctattttgaagacagtttgctcaagggaaaattaaccattcttagttagcatttattttctattcccaataaaattcatgaaagtttagattctctgagagaggagacaaggggtaaaggcacttgctatcaagcctaatgacctcagttcaatctccaggactcgcattgtaggagagaactgatctctgcaaattggtttctggccttctgcacatgggtaccatgcatgatacatgcacacacaaacacacacatatactacaatagataattttttaacttttgaaagaatagaaaaaaatgaggctttgaggaaatcatgttgtttgagggtgggatttatgacataaacacatttcattgggccatggtctttctctgtgcatttactcacatctttgactaacagaagaaatgagcatcctgactggatgttttcgctgtcactctagagtaagaaaggaactttatctcatctcctgggtttgccacaaccaaggtcatttaggttttggtctttgttgtgcccgagatgatggagtcctcagcgctcttgattcatgggagtctcccaggtgggtcccaaggtttgagtctagagaaggaaggccctccctaccttgtgctttttctatgatctgttctgtaatttgaacatttccaacttccctctgagatgattaagtatctccccagttattcaagagagctgctgctttggcctctatggctgaattttgtgcctgatcttttccttgaaattagaggtgtgattgattaagagggatggataaaccttggtatctgcagtttcccaaaataagcaaaaattaaagagggttgagatgcagtaatgcgactgtaattatgaaaaaaaaatcaagcttacaaaaaaattgaaatagttgtgtgaagaatcccaattgacttttctcccaaatttctgaattattaacacattgttctatttgtatcccccagcctccccctcatatccggataaaagttgccttctatgtgaatacaaaaatgataatttaataaatggtattggagtagcacagctgttaagagcggtagctccagctcatgctttataacctaatgagttccgtggatcaaagatctaaatatatgaaggaaaggaaaacatagaggaaaataaacgctcataatcttacaatatgaccacatctaaataacagagagaagctacaaaacataaaatgaaacattttaaactggaaacacttcatttcggtatggcaagacgataaacaatgaaaatatgatatcaaaaatcaacaaaaggaaaactagcagtctgagaatgcacgcagctcactggtaaagcagtagcttggcctagacaggctcttttgggggaagcttatatatcagcagtgattggaatagtcagaacattaatgcccttggggtacacaggtaattgggagtaaacaaatctttgaaaggtttttgtagaagaatttcttctgcagatgactggactttttttctctttgatgtcactatgtaagtccttataagattgtggatagtaagtgccttcaccaagtcagcaaagtttctctgttgtttagaaacattaactatttccttctcgttattttcgagtagcacagtctgtttcaaaacatgttttatagaacaggcttttttttaagctgaaattttctatactggaaaagaaatgataaaacagtttcaagtaaaaacacagtctttaaaagcatatttgcagagaaaatgtatagaagtgagtggtttgggcttcagaaatgttggttttgtgactcactcacgcaaaccgtgggatctgtttccacagagtttaggagtggacactcttcctcctccagaccccaacccaccccgagaagagtttaactacactgtggggtttaaggatttaaatggtaagcacagaaacgtgtttcttaagaactctaacaccatagcagtgatgggggtctccacgggactgagtctgaccatgaaaccaaggaaacgtggacttcatgggaaacagtgtgtaaaccctggacggtgcattgtcctttactgtgtctacatttaattaataaagtcaattagatattttcacctatgatgaaagagaagacccgcttccatttatgaaaagtctcaagataaacttattggacagagcacagggtccccaatgagggagcgagagaaagggcctgaggagctgaaggggtctgcagccccataggaggaacagcaatatgaactaaccagtacccccagagctccccgacattaagccaccaaccaaagaaatcacatggctctagctgcatatgtagcagaggatggcctagtcggtcatcaatgggaggagaggtctttggtcctgtgaaggttctatgccccagtatagggaaatgccagggccaggaagtgggagtgggttggttggtgagcagggggaaggggcagggcatagagggattttggaggggaaactaggaaaggggataacatttgaaatgtaaataaagaaaatatctaataaaaataaaaaataaaaacaacaacaataaaagaatccaagattacatgaagagggggtggagggggggagtggggtgtgaatatgttcaaaattcactgtacacgtgtatgaaattctcaaacaatgaataaaaatattatatactataaaaaggaactttcttattactaaggagtcagtaagaaatgactcttcaaggataaaaattaagtgtttaataacaattgatcgtgtatgaatgggaactgattccaaatacattttattctaaatatgtattttaaattacaatcatgtatctgtatataatttactgtttgaaactttcaatcctctggagattaaatctttactttatagcaagatcttcttttcaatttattgcagagaactaatctgatgatcattgaaatgatgatgaatcttgaaataatcacttccatggtagtgagaattcactggaactcttggtgtcagacattgaaccacaagggcagtcttggtagaactcttgaaaagagtagccaagtctttcagtgaccccaaaacataacaactgaagttacaaagaagctcagtacagaaccccagtcctggctattgtctccatttctcacccagcttcactgtttctgtcttttgcagtattttcatgataagcccaaaggcaccaatgactgttgattggtcagctataatgcacctctttctagtggtctcttttctacacttattttctatactctactattcaccataaaacaaaatgtattattcctgccagctatagtcactgagataatagcatccatgaagtttccaaagagtagtacactttgcttagtacattttgacaaccctgtctaacagacacttccacttagggcctccagtgggtgtttggtttgggaaggagttcctagttttattgttttgttaacttgatctcacctcatgatggagttctggcctgaaactttctatgtagactatggttgccttgaactctcagagattcacctgcctctgcctctggaagtgccacaaatgagcactttatcatcagttccactaaaatttaagtttagtcagtgttcttactgctgtagtaaactccaggttttctaaacacttaggatttagcatcaaaaaagtagcaaagatgatagagtcaaagaaacccacaaatctccaggcacagtccgttacgatgtggcaacaaggggacaatatgcccatggatggatggctttgggagagggcagaactaccaaattcctaatgtatatagaaagttaaatttgtttagaatacttttttttttttttttttttttttttttggtttttcgagacagggtttctctgtgtagccctgactgtcctggaactcactttgtagaccaggctggcctcgaactcagaaatccgcctgcctctgcctccccaatgctgagattaaaggcgtgtgccaccactgccaggtttagaatacattttttattgccctcagttaagttattgctaaaatgagttaaaaataagttaaacaagttaactaaaaatgaattaaaaattcagagaataacagacttcagcatggaatccatttctcattccccattcttcagtatgcaattctacattgattagtaaaaatgtatctatactaacacatttaagctatagcaatacattttgagctctttgacagattaataaggcattaaagaacattttaatgtaaatgaacttttctttagacagtaatataaatttcattgtagggattttatcactaaagtgcttataactatatacaatatagttataattatttagagtaatgtttattaaaagattttttcattaacaattgtgactgaccatgttaggaaattataaacaagtttcagttttggctcatatcgctgaaattttttaaaaataatatttttatgcaaaaatagtttataaaaaaatctgcttcactcattttatggtcaaagcttggaatgagtgctgtgctagaactcttataatgatgagctgtgctgtatggcactgaggttgtccagcagggagctgacccatagtgctttctgctttttactaggctccatttctggcactcccatttcctcattctgggtcatcatgcacagcgtccatcctttgtcactgaatcatcacttggtgaatgcctgattgccagcacaatcatctgctgatgttatccaccaatgccacatcctctgatcccagcaagctagccaacttgctgagtatgcatgtgcccttatctcacagttgggtgagatctgaaagaaatctcctcctttctcatcgctctaaaaagctgtgttctctctatcttgtgaaagctctctgagtgagcccactgccttcacaaaatctttactacttagtctcctttttattttcttttattcttttgttgcattaatcctgcacttcagaatgtaaggttctcggcggttaaatggggggcttccagaggtttgctctgcacttcctaaaggtgggtgaaacccagctgaccaccagtgggagaactccccctccacccatttccactttcctcttcctctactcttccaaagcccaaggctcttgcaccaaaatattcaagagtccctatgtaggcatctgctcatgtgctcaactctgactgtagctggagatacgccagtgcagagcacatttccctcttttcttcttgttaggaacttacttacactatgtactgattgtattattttagaagtgtcaatatgtgaatgtgttacactgcataaaaatacttccaaccttttttattgtatcatagaaatttaaataatgactcccacctatgtacatattgctctttaaaaaaaaaatgctttcaggtttttccaggtacaaatagttgatttgtttttcaaacattgatactgttatttttttttcctcttagagtccttaaatgcactggaagaccaagatttagatgccctcatggcagatctggtagcagatataagtgaagccgaacagagaaccatccaggctcagaaagagtcctctcagaatcaagatcgttttgcacttctgagggcttcggatggccagggtacagcctcaggaggttatggagcaagtgctgctgctattgatgttagtcaccatgaggaagctttaccacctccacccgtagaacccatgctagaccttctgcctcctcctcctcctcctcctcctcctgaacttctctctaaagtaagtccataggacccaagatggcaggactgttgctctccatttactatctacccatcaccttggactttctttgatgtgacaattacatctatcagtttgtatgcctaaacctctgaggtactggggaaaaagagcagtgttgtcttaatctgctttctattgctgtaactgaataccacagatgtttaatgtataaaagaagaaaggctaatttagctcacagttctgaaggttggggaatattaaagtatggttctggcacctttccagttttgagagggagctttctgcccatgcccccttgctttaaaaagatatcactggatcccatcttttaatttttcacaagggaattaaacttcaacatctgttttggtgagaacatttaaagtgtagcaagtatatatggagaacccattaagaccaaatatagtgtttatagcttggataaaagtaatatgcatattccttaacaatactcaagcttcatggatacttaacagccatccattagacagagcacaaggtccccaatgaaggttctagagaaagtacccaaggagctcaaggggttttcagccccataggaggaacaacaatataaactaaccagtacccccagagctccctgagacaaaaccaccaaccaaagaaaacacaaggtgggactcatggctctagctgcatatgtagcagaggatgacctagttggtcatctgtgggaggagaggcccttggtcctgtgaaagtgctatgccccagtataggggaatatcaggaccaggaatgggagtgggtgggttggtgagcagcgggagggaagaggggatagtggatttttggaggggaaactaggaaagggggataacatttgaaatgtaaataaggaaagtatctaataaaaagaaaaaaagaaaagaaaagaaatgcatggcttctaggaacagtttttaccagtcttttaaactcctcttaaaaataaattgtatttttaatttggttacaaaaaaagtactcaagcttcagaggacacgtctcattaactttgtatgaactaagaagttgatttctatgttcattgcccctgttcctagcccagaatatagaaaagaataggtttttacttgagttaatttgaattattgcctctggcaacccttttcaatagggcaaagactatgtatctttgggatgccttcattggggaggtcaaagacaggtaataaatgcttgatatttataaattgctaaactttgtaaaataactatataatcttcatttaacatgttaattacatatttttcaaaaaaaaaagagtaaaaacactttgaagacttttcttaaataggtcctttaaaaatatttccaagtaagaaccctgctcagtttcctgtgggctcctattgtcctgaatggtggtggtcactatcattcaaatcatcgtaatgatgctgggaatgcctaaaattttaaatttaaatcacatgataaatccacattgtatcacactcattgcttcatcgattgagacaaagcagaatcgccaagcatagggcccctcgtggtatcagggggaccatcaattccttgaaagtaaacacaaagttgagtgttcaggtagatagttacaaagttcctcactttcaattgttcctaaagtatcttggcactcaaaattatttcagaaaccagtgatattagaagagataattctactttcaaacagtagaaatgtaacaccttttttcctttcatgaaaaacaattcaatttcttatcattataaataaacaaataagattttgctgacatgaccctgatatagctgtctcttgtgagactatgccagtgcctggcaaatacagaagtggatgctcacagtcatctattggatggaacacagggcccccaatggaggagctagagaaagtacccaaggagctgaaggagtctgtaaccctataagaggaacagcaatatgaactaaccagtaccccctggagcttgtgtctctagctgcatatgtagcagaagatggcctaatcagccatcactgggaggagaggcccttggtcttgcaaagattatatgccctagtacaggggaatgccaggtccaggaagcaggcatgggtggtttggggaacagggaggggggagggtataggggactttcggcatagcatttgaaatgtaaatgaagaaaatatctaataaaaagtttaaaaataaaaaaattaataaatacataaacaaacaaataaacaagagaaccttaatagtcctattgataagattttacattataaaatcaaaggttttattcctttgaaatataaggatatttcacactctttgctgatgttcatttttgtgttcattagtggagtgtttgttttatttcgttttgtttattttgttttgctttggagtttttgtgatttgtaaggttaagttttggcttttgtattaaaatgtaggctgttaaagactctttaaagcttctaataacagctaggagtcctcctctaaatagataccataaaccaagaggatgtgtataatggtaggaagggctcaactccctcaggatgaatgctttaataggttctgtaggttggtatctgtattagttatttttctgttgctgtgataaaaatactactaccagaggaagttaagagtttattttagcttacagctatagagaaatcccatcatattgggggagacccagcagcaggcttgcagagcaggaagctaactgatcacattctaggcacaggatagaagcagaaagccaactggtcatgagacaaggccatagactctcaaagcccatttccacccatgtactttctccagcaaggttccacatcctaaaatttcctgcacttccccaaacagcaccaccagcaagggccaaagttcaagtacatcagtttatgagggcttttgcttcgttcacattcacagtcccctgttctttgagctgagcacagatagcatgttctaagtacttcatacagtccttgaagtcatagtttcatttcttccgataaaatcctcaaggctataatcaacagttgccttctgtatatttgagtagaatattttagtcaagggcattacctacattctgaaaatgaaggatgtgaaattcggtaattttgtttctctaaatgaaccaacacacaattagtcactggtgtgatttattggactctgttgactgtcttgcccctttacaggaagaagaagaagccaaagcaaaggctgataaaattaagttagcactggaaaagctgaaggaagccaaggttaagaaggtaagctaccaaacacatttgcataggggagttaaattaatgatgtcatattatagttaccggtaaacagtataataaatgttcatgtgcctctgagaatacaggtcagtagttggttatctgtttagcatgcacaagaccacagctttaacagtgtcattgaaagaaaactcaagtagcactttccaaataatttttaaagaattctcagaacataggacatgacaacatttttctctacataacaccatttagctaatttgcaatttctaggtagggaacctacctccatccatttcttataagggctttctggtgctccatggcaaagagctctccatggtgagaacaagagcgtccaaaagcatttgcttagctcacatgtgactttttgctggtttcacatacattttcccataaaccaggatagtgggagtagaaattccctttaacaagaaagaaaaaagtctttggttttgctatcacctaggcaagggccttctcagttccattttgagaacttaaaatatgtccatcctggaatcccttccctgagggatgctctctggggtcttccatagctctctgcttatagcatcctctgggcatgctttaattgggtcacaccttagcaaccttggcctcacatttacatagtttcttttgtgaattttatgctccttgggaagcctctagacattaagcttgtgtggacgtctccccatgaatcaaacatttgttattaatctagtctttaatttgtgtaagctttgagtgatctgtttcttatccttctttaccaattagcctataattttcttggacatttttgtgagtataaggtgttttaggaagatatgtattatattacatgagaaaaccctgtatctaacctgattggaacactatatctactattaaaatgtcagttaattttttagttaatgagacaagtactcaatctgcatcttatttcaattgaaacatctgtcatctctcactaaggtgaattgtctttgtcacaattcttgaatgaaggaattgtatacatggtgaataattcagtaaatatctcttggggatcccacatccagactttcaaggctcatatgtgaagctgttttccagatagagctggttcaatcaacttattgctctctgcgtgtatgtgtcagctcttcctcactgtgacaagcacctaagataatgacctggattagttaccttcctcactgctctgatgaatgcccagcagtagcagtcctagagaggaaggattgactttggctctccatttgaggttttagtccatgatagtggggaaggcatagaagcaagacaatcagaggctgtaagagcaggactattaaggtcagtggtcacatggtgtctgctgcctggaagcagagaaagatgaatgctcaaacatgtgaagcctgtcatggacatctcacaaccatagctacatatatcatgcaccactcaggtcatgagggaagaattgccatgctgttgtctaagatcacctatccctgagctgggcatggtggcacacgcctttaatcccagcatgaggcaggaggatttctgagttcgaggccagcctggtctacagagtgagttccagggctattcagagaaaccctgtctcgaaaaaccaaaaaaaaaaaaaaaagatcacctatcccactggaatcccagtttgccttctttctctggtctaagagccccaggggctgcctatcttgtacagtaaagccacacccctcaagtaccctccttcctgtctctgcgtgatctggatgccattatctctctagcctcagttctctccattctcttcttctctccctctctccctccctccttctctctacatttacctcactgtaactacctgtcgttgtaactgtcctgcaaacactctacaagtccttgttgtggaactacctatcccttccactcttacccagattctcactggattttttctgcccctcccccccaccatgtattcagtcgccttctaagtgagagtgtccccatcactgtacacactactccctaaaattctcctcagtgaattatcaccacacaatgcactacccactaattcattgcctatatattccctcaaaccctctaaagactttatcctctttaacaatgcactctgactttagaggagttactaggtttgtataatggtccagtgaggctgttacttgttttgagctaaattccagtaaggaaggcaaatgcagtgatgaaaattaaaccaggctcagtatggtgtctcctgcctcttttcccagcactgaggatctagaggcaggaggattgaaaattcaaagctatccaggactacaacactaagtcttcctcctcctcctccttctacttcttttaaaatccataagcatgagccaaaaaagaaaaaaatggaaaccagaagaattgctaggcattgtcgaagccactcctcacatccattggtgataatgaagcctccctgggaaggaagggggctcttgagcaaagtcctcagcagcaggaggcagctagatacacaggacagtagtaaaggtgatcctcaaacagagatgagtattgatgatgcaatgcatatcttaggttcacgtaaaccttagcttgacgagatggaacagaatgaaagactgttgaccacacttcagtgacctactgagtaaaagcaaaggaaggaattgatgttaatgtggtaggtaggagccacaagagcacatagatagcagagcgagtttggactgtgtcttaagtacaagaagcctttggtggagctctaaatggggagataggagattaatgaataatttttaaaatccatactggcagattcacagaaaatcaattgtagggatgtgcaggtggtctgtgactgtattgtctgatctggagtaggtgggtgccctgttccttctttagtatcccatgtgtgtcccttccccccacacagggggctgtatgatgggtcagagaggactatgttcctcataaatatggactgttactctatcaagagtataccgagtgtatcccccaggagctcgtgtctctagctgcatatgaatcagaaatggcctacttggccatcagtggaaagagaggcccattagtcgtgcaaactttatatgcctcagtacaggggaacgacagggccaagaagtgggagtgggtgggtgggggagcgggtgggggagcatgtgggggacttttgggatagcattggaaatgtaaatgaaataaatacccaatttaaaaaaaaaactgaggaaaaaaaaaagagtataccgagtgactagactcccatggaaaataaattatactagtggagaatggcagtggggggacttgttctagattgttctagcacaaatgagcttgtgttggattgaggtacaaatgagtagcaggtgtggatatactgtatggaatggctttgctgatggatgcagataaaagacaataagggcagagaggctgcagtaggaggacctcaagttcaagagaagccacaaaaccctgtcccataaaaccccaaggactcgggacgtcctcactagcaggatgtttttctagcatgtgcaagggcctgggcttgtgagggaggaagagatggagggagagtgagtaagtttttaaaaattataattatgcacttttaagccaccgaaatgtttataactgagggtcacattgtgtgatttcagaaaagaactgaaaagagacatgtctcttacaagagaaggtgggacaaggagcagatgcagtagcttcattctggctggcctggggagactttgctccttttatttacagtgacttatggcagtaaacacaaggcacaacctgcccggatccatggaagatccagaacatagcactcatcagtaggaagggatggaaggttcctgactctccaactacattttttaagacatgaccctgagccgggtggtggtggtgaacgcctttaattccagcacttgggaggcagagacaggcgaatttctgagttctaggccagccaggtctacaaagtgagttccaggacagccagggctatacaggggaagccctatctcaaaccccccccccccacaaaaagacatgcccctgtgtatgacacagtacattaagcaaataatagaaatgctccatatttaaggaaaataactttgagcgttttaaacaataaatgtgagttagaacaagaaggctgaggaggaagatcactcttacctcaaacttaaacccaagtttaagggcagactgagttacaatgaaaggccctgtctcataagaaaacgaaggggggggaaaccctccctcattagaagtatttgctcttaaggatttggtggaatgctgacattattttgaactacaaatgatgtccatagcttatagcatgaagcttttgaagctggaaacacaatctgactaatctattaatttaatttattctacagctctgtggcagaagaacaattccatttgtaaatcttattatagaagtccaaaaatgcaatttgcatgatttagggctaaatttttcccatttttaacaacttgcaaataaaagtgagatttcattatcatttcattatcaaggcatttggcccatagaagatcgtgtgactaattagttgcatagcaccgtactgctgtggcgctgttacacgttgataagtaccctctgcagcttgcaaatagagtagaaactgtgaagaaccacaagtatgagttcttcctttttattcactttatttttctaaattctacaattatagatattcataaatacatatggattaaacttagtttgtgccaaaaagaagcctcttccatcattatgaaactatgtggtttagcaatgtctccttccatattaaaaaaaagaaaggaaaaagcaacatgttttcctttctaaagcacctctaagtaggagtgaaatgtggtcaaatgtcatgatttttctttatcataaatattgctttcaaagccctaacatcagttgtgtttcccaggaatgtaactattctatcacaaagaacattctcagcaaagaacagcatgtatgcattccacagaaaaatacaaaaaaaaaaaaaaaaaaaaaaagacccaactatagtcaagctaaagaaggtataatcatcatgacagaccagggggcactccaaggtgacacttgtcccctccctgtaccatcacactattgaagtaatgaaccttaaagaattaaaatttcaccagtaatcccatgcagaaggcttaaactctgtcaccagcctgttctagtttccttctgttgatgtgatttaaaaactctgaccaaaagcaacttaggaaggaaagggtttatttgacttgcacttccagatcaggaaagacctttgagagaagtcaggttagaattgaaggcaggaacctggaggtgggaattatagaaggaatgcttgcttgcttgctcattggctaacccatagatgtatttatgtttacctagcattttatacagtccagtaccacctctcagaagaatgatgctgcccacccaccgtgagctgggccaatctgtatcaattaatagtcaagacaatcccttgcagatatgtcacagaccaacctgataaagacaattactcaattaagattcttttctcaggtaattctaggctgtctcaagttgtcagtaaatgaacacaaccagaggaaaatatatatgtgtatattatatatatttatattatatattatgtacatatatgtatatacatgcatctatttaacacccacccctgtaaggttcaaggaagaggaggtgaaaaggttgtgagagccaaatgttgatgctgactgctgtaaaagagcaccttctggacatgacagggtttctgtctcatgaactcccaacagctgcagttgcttgcagaaaacttgttcaggatcagggcaaagttccagcatgggagagggatacatgaagccctaaccttacctaagaagctattatcagttgatgacactcaggagaggaagaagcagttccttcaggaatatggtccctggtagtttgcccattctccaatggatgggcctgtgtgtagataggtacatattggcagcactgactggattcaatgaattgaaaaaaagagaacatgaagttgggatgggacatggtaggggatgttggaagggatagaggtgggattatgggggattaatatgatcaaaatacattgtatacatgcctaaatctctcaaagaccaaatagaaatatagctaaaaagtgggatatatcctctgacctcactgtgaactcctttatataacaggaaaacgcaggatgagaaataaatttgaaaaacacaaaccagacaataaacaatgctcttgggccagtttcaaggcactgatttctggtggggagacagaaagcaaacagaactgaaggagcgctcacttctcattttcccaacatccttccacttttgttcccattcatttttagggccagaagtatttctttattaaaaggtctccttgtgtctttacaactgaagtcccattgttaaggaaaattttaaggtatggcagcctttgataagctcggcttatcaaagtgtcccatacccaatgtgccaattaagtaaagctacactgggaagaaaaagaaataaaggaagaggtgcagaggtcctcaagtcattgtttaggacattggcaaaaggtttaaagagtggacaagagatttgtgtaattaaatagtcctagttaatgacttatattgctaagcactcagggtgacttattcaatgtactttgaccaattgagtcataactcactgatgagagtcaagagttgcattaatctatggataaaaagatatatatttagaaggcagtttgatcctacattgtttagtaaaataatagatagaagtcagttttcctctggggcccataatcccttcagccttgggttcttggtccagtttacaataccaggcatgggttctgtcctgtggagcagactttaaatccaatcagaaagtggctggttaccacccataacaatcatgccactactgctggtgagaaaagtcaacagtcttacccaactgtgaacctagtgagctacagtaaagacagcctatcaagatattcaaaggatgaatttctaatgctcagtggcagaaacaatgacagtgctgacaccttaagcttagcagaccgccccagttgctggaactaactaactgttctgtggcttcatcttcagcttgtagttaaggtgcacatggatgacagcagtaccaagtcactgatggtggatgagcggcagttggctcgggatgttctggacaacctttttgaaaaaacccattgtgactgcaatgtggactggtgcctttatgaaatatatcccgaactgcaaattggtaagtctcctccccacatctgggttgcacttcaaaagcctgttttattacacgttttagtctgttttaaccacttgtttcaatatctcaagacatggcgtgtgtctctgccttcatctgagataaatccttgtctctgtttctttgtggcagacactcagtcggtagagggtagccaggctttgggtgatgtgaacttcattactgtcaccttgctagtcactccaaaagggaaaaaagggggcaatgtggttcatcctgttacatgcttaggaagctcatcagactgcaggagatcctggctatctgtctgctaatattcctttaaagagtacttccctgaagcataacgtgacttccaggccttacaactatgctcatttcttcttcccctgtccaaatgtgactgatcgccaatttctcaaccccagagagcaaagaggagtgaaataaattgatgatctctctctctctctctctctctctctctcctctttcagcagtttaataacttccctcctccttcccactcatcccctgggcaacactatctcccaagagggttgtataaaactcagaattatctgcttttgaggctttagggcaattttttctatagaaagtggtccacattaaaactgttccttaaccaggcatggtgacacatgcttgtaaccccatccctggagaggatgagacaggaggaggatgagtcccaggccaattcaggctatgtagggatagtctatctcaaaactaacacaaaactaagcaaggacagaacaaaggcttgctgtttcctccaattctgaatgggaaaacagggaaggagcagcttcctttactctccagcttggttcagtgtccacctattatccttagagttgtagagtcatagcttaggagtttcacagtctgcatcctctttggccttcccatagtatttacccctgctaaggatgttttcaaaggaaaaacaaacgctaacaattaaaaagcaggataactcactacaacccaaaatactgaaatttctaccatttatcatgtttttgtgtaaaataaacttaaaacctgacagtgacatataaaatagtaggaatgctgcactactgttacaggcatgggtgttagctcacacctcaggcactgaagtcctccagttctcctgcctctttacagcagaccatacagagacatgttgctagttcaggaaaggaaataataggttggggacaagatacatagggacctggaggtgtgccctgcaagaaggaagagtaggagctgaggagggccccagtaaccttttatgagtcattaacatagcacctgcctccgtcgacttcagatacctacccgttttttcagagcatatgcctttggctgaatagattcaaacccaggtaagtaaggactgccagtctttagaagccttgtgaggcagcattgtgcttaactcagtaatagactcccacctgaaatatcttttatttcatcagagagagtttttgaagaccatgaaaatgttgttgaagtcttatcagactggacaagagacacagagaacaaagtactgtttttggagaaagaggaaagatatgctgtgtttaaaaaccctcaggtaagatggcctgcatttccttaaactatgtaatgaaggaagaagtttttgtcacatgtgtactgaccaaaccataatctcaggaaatctcacaagtgtgttgctttcaaaaaaaaaaatacaaacttaaaactacctcaaaagattttaaaagaaaacctgtttctctcttttgttttcctttcaaaattcaaaactgtcttagtcagggtttctattcctgcacaaacatcatgaccaagaagcaagttggggaggaaagggtttattcggcttacacttccatgctgctgttcatcaccaaaggaagtcaggactggaactcaagcaggtcagggagcaggagctgatgcagaggccatggagggatgttctttactggcttgcctcacctggcttgctcagcctgctttcttatagaaccaagactaccagccaagggatggtcccacccacaaggggcctttcccccttgatcactaattgagaaaatgccttacagttggatctcatggaggcatttcctcaactgaagctcctttctctgtgataactccagctgtgtcaagttgacacaaaactagccagtacaattgaccccttgtcaacttgacacacaaacacatcactagtaagcctcaaccattacatttttattcatccccaaggtctaaataactctaaacgtcccacagtctttacatattcttaaattttcagtctcttaaaattcaaagtctttttacaattaaaagtctctttaactgtgggctccactaaaacagtttcttccttcaagagggaaaatatcagggcacagtcacaatcaaaagcaaaagtcaatctccaaccatccaatgtctgggatccaactcacgatcttctgggctcctccaagagcttgggtcacttctccagccaggccctttgtagcacacacatcatcctctaggctccagatgcctgtactccactgctgctgctgctcttggtggtcatctcatggtactggcatctccaaacactgcatgaccccttcagtcctgggccttcaattgcaactgaggctgcaccttcaccaatggccttccatggcctctcacagtgtcgagcctcagctgctttgcgtgaccccttcatgccttcaaaaccagtaccacctgggtgacccttacatattaccaagtcctgctgcagcaggagtacaaccttggccatctctggaacacagcctctttgtgctttcagaaaacacttcccagaagatgtcacctcaatgatgctggtctcttcttttttttttttttttccattttttattaggtatttagctcatttacatttccaatgctataccaaaagtcccccttacccacccacccccacttccctacccacccactccccccctttggccctggcgttcccctgtaccggggcacacaaagtctgcgtgtccaatgggcctctctttccagtgatggccgactaggccatcttttgatacatatgcagctagagtcaagagctcaggggtactggttagttcataatgttgttccacctatagggttgaagatccctttagctccttgggtactttctctagctcctccattgggagccctgtgatccatccattagctgactgtgagcatccacttctgtgtttgctaggccccggcatagtctcacaagagacagctacatctgggtcctttcagtaaaatcttgctagtgtatgcaatggtgtcagcatttggaagctgattatggggtggatccctggatatggcagtctctacatggtccatcctttcatctcagctccatactttgtttctgtaactccttccatgggtgttttgttcccacttctaaggaggggcatagtgtccacacttcagacttcatttttcttgagtttcatgtgtttaggaaattgtatcttatatcgtgggtatcctaggttttgggctagtatccacttatcagtgagtacatattgtgtgagttcctttgtgattgtgttacctcactcaggatgatgctctccaggtccatccatttggctaggaatttcataaattcattctttttaatagctgagtagtactccattgtgtagatgtaccacattttctgtatccattcctctgttgaggggcatctgggttctttccagtttctggctattataaataaggctgctatgaacatagtggagcatgtgtccttcttaccagttggggcttcttctggatatatgcccaggagaggtattgctggatcctccggtagtactatgtccaattttctgaggaaccgccagactgatttccagagtggttgtacaagcctgcaatcccaccaacaatggaggagtgttcctctttctccacatcctcgccagcatctgctgtcacctgaatttttgatcttagccattctgactggtgtgaggtggaatctcagggttgttttgatttgcatttccctgatgattaaggatgttgaacattttttcaggtgcttctctgccattcggtattcctcaggtgagaattctttgttcagttctgagccccattttttaagggggttatttgattttctgaggtccaccttcttgagttctttatatatgttggatattagtcccctatctgatttaggataggtaaagatcctttcccagtctgttggtggtctttttgtcttatagacagtgtcttttgccttgcagaaactttggagtttcattagatcccatttgtcaattctcgatcttacagcacaagccattgctgttctgttcaggaatttttcccctgtgcccatatcttcaaggcttttccccactttctcctctataagtttcagtgtctctggttttatgtgaagttccttgatccacttagatttgaccttagtacaaggagataagtatggatcgatttgcattcttctacatgataacaaccagttgtgccagcaccaattgttgaaaatgctgtctttcttccactggatggttttggctcccttgtcgaagatcaagtgaccataggtgtgtgggttcatttctgggtcttcaattctattccattggtccacttgtctgtctctataccagtaccatgcagtttttatcacaattgctctgtagtaaagctttaggtcaggcatggtgattccaccagaggttcttttatccttgagaagagtttttgctatcctaggttttttgttattccaaacaaatgctggtctcttcttaatcaccgctaatttcttagctccagctaaccagcatcaatagtcccagtaatgcaaagtttttgctttggtagttctggtatcttgttaatcacagctgattcttcagccccagctaaccagaactacagaatcttcacaatcaaaacagcaatggccctgaaaagagtctttaattttccctctgaaatttcacaaaccagacctccatcttctgcagtgttctcaacattatcttccaagttcctacacaacatctgacagagcttttaacaacggatggatcttcaagcccaaagttccaaagtccttccacagtcctccccaaaacatggtcaggttgtcacaggaataccccactcctggtaccaatttgtcttagtcagggtttctattcctgcacaaacatcatgaccaagaagcaagttggggaggaaagggtttattcggcttacacttccatgctgctgttcatcaccaaaggaagtcaggactggaactcaagcaggtcagggagcaggagctgatgcagaggccatggagggatgttctttactggcttgcctcacctggcttgctcagcctgctttcttatagaaccaagactaccagcccagggatggtcccacccacaaggggcctttcccccttgatcactaattgagaaaatgccttacagttggatctcatggaggcatttcctcaactgaagctcctttctctgtgataactccagctgtgtcaagttgacacaaaactagccagtacataaacatacctatttgttgttgtctaattctcttcttgtgtctcaatttttattaggcaccattaacccaatatgccttgatatactatagattattaaatttttctattgcaaagtactgcaatttttagttcatatttgtttcttattgatactgtgataactgaagtaagaggcacaggaaggtatgagatccataaccaaccaccatattttttaaaataattatgaggagagaaagatttatttatagtttgggtcagagtttatgaaagaaaaatattagtttctctttaccttttctatggcagagttatattttatggaaaagatactatgaaggtcagaaaatacacatggatagacttagtcagaatggtatgaactctgttccttggagacacccactctgctgatgcagctacagcccattccttctctctgcatggagagttcacataaaccaccccaagaatcatgtcttttacggggtcccaacaacactgtttcaggagcacctggagaatgtaaaaattattgtgatgtccttaggcaattgacacaaagacaaaagcactgttgttatatttgaaagagtatccctcaagtcatatatcaggatgccaccaaaaaatctaagcctttctaggaacagcctcaagcaactggaatcacgtgagagacaccacataaccagaataccagcctgtgctgcctgtcaccacaaacacagtggacagagacaaggactgaacctttagtttacactgagttactcagagacgcagcagtctggaaaaacagacagccaacacctccaaaaggtctgccttctccaccccatctagtattctttgtagggaaccccaaaaaggcagttaaacattccagagtgtatccctgtccctctagtcaggggatactgactcttactcaccatattggacttctctgcactcttcctctgctaccacagtgccctgtggaacagagtttatcaccacacaaggctatttagtctcgtattcctcccaggcaacatctagaccaaaagctggctcagtggtgtatacaagctgagctctactttacaatggcaggtacccacatgtctttatataaagggtccctttctgtccctcctgtcccaattacattttttttcaattctaaaaatgttactaatgaaagagatctccaaggtcatccagacgtctttctattttgcacaagaggagtctgaatcttgaatcaataggagcagaattaggaaagtctgtggcaggctacttacatgaaaaggttctttccctctgtgttagttttttcatcgttgttgccaaatgcctggacaaaaccacttacaggagaaagggctcatttggctcacagtcacagaggttgccatctattgtggtaaggaagatatgatggacccttcgtgatatgatggacaggaagcagactagggaagtaacaggaaaaaaatctaagataaatccccaaagatatagccttagagacctccttcctccagttagcgcgcgcacacacacacacacacacacacacacacacacacacagagttcctccccttcccaacagtctattcagaatgtgaatctatcagaggattaatccactaattagatcatggtccttattctattttaatccctgtactagtacacgggacggaacaaagaattcctctaattccatgtgtcaaacaaaccacaatcttcttttttatatactgacccagaaaaagtaaatagatttaataggacgtctctgccatcctcaacatttggcttctatctccatgtccatggtggcattttctaacagctcatccaaggtagccttttcctaaaagctcatctaatctgtaggaaaagaggtaagagccagggggatgtttctttctctttgaccccattagccataaatgagctatggtgacactgaactacaaagagactgaggatgtgatgcctgggtaacaacctgagcacactgtactcagggccaccattttgcaaaatgaccttcaaaagagaccttttatattgattgactctgtgaaaacactgtgcagggattgtgcagtgtgtccactgttaagaggagggaggaggcattcagcctgctgtggtgaagcactaacatatcaatcatataggaagcagactagggaagtaacaggaaaaaaatctaagataaatccccaaagatagagccttagagacctccttcctccagttagcacacacacacacacacacacacacacacacacacacacacacacacacacagagttcctccccttcccaacagtctaagtctgtagaagtccagtctatgaactttacaaagtgaatacttaccttcaactcatgccttcgagaggcataaatgggctctttgtgtctttcccttgtctttgcttcccactatagtggcaatctgtattcagatctttactgccttcattttcccttactttggactctgtgtgaaatggcctcacgttgtagttcacatttatgtttagattttattcccacttgactttcattcacatagctacccatagcatgtttccccttctccctgccaattggtattccatcagacaactaaacaaaaatacatttattcactgaactgctagcagcatgtgatttgcttctagctggatggttaagtagtaatgatgataggaatatcccatacatgttttcagctgaacagatgtaaataaacattctcatgcacatagacctggaaatgaaattacaaggacatagattatatttctatttagctatggcaaatcctgatgaagaattttctgaacgttctttaggttgtctctccctttatcattgtatgaaaatctctacttttccagattctcagcagctattggtgatgcttttactggctagtctgaacaaattaataatagattctaagtcacaaataaggcattggtgtcacattaagaaaagaagtcaaggtgctttccttctgtgtcatttaatcaagggtgcagccaaatctgaagtctctacttcatgctccctatcttccatcctctgtctgtttgctgtgtgggtctgaaccatgcttaccttaaggctgccttgtgaatctgtcctgtgtatgtatatgtgtctgtccctggtgtctgtgtgtacttgtctctgttgcgtctatcaaagggatttgttctgtatttattgaacagcacagaaagcatcccatgaggaaggaatggggtactttaaaaacattttaaacagagttttacaagagataaagtcacctattccaaccaacccagttaacaaacaccactgtttactgatcaatttcaaatgttgtatgttatgctccacttttacagtaaatattcatgttataaagttgctttaaacctcgagtttttctgttttcagcagaaaatacactgcattactcccaggtccaagacatggtagacaggaaataacttaagattgcagctatttttataaccttgggctattttttttaaatactgttatagccaggaagcagagaaagatgaaaacttggcactccattcactttctttctgagtctagttttaacaataaagcttaatcatcatataatacaggtggcatggaaacagaaggaaagattacgtgtggggaggagagagacaagacaagactaagaggagtagggcagtggggtggagcagtgggaacaggacgaataataacatagtatggtgacttacatgagtgaaacagtcatgatgaagcccattacttcatatgtgtacttaaaattgtaatgaaaaagataagaaagaaaagaagaagaggggagggaaaaggaatagagtggataagaggggaggacgggaggaaaggaggacaatagagaagagaagagaggagaggaggggagagaaaaggagggagggaagaggagaaggctagcaagatacacagtgggcatacacagcctgacaatgtgatttgattcctggttcccacaagagggcaagagaggactgactcttctttcctctgaatatcacacaactgcatacacacacacacacacacacacacacacacacacacacacactatgtggattaaataaaacactttaaaaaacagcgcatatgtcccagaatatcagttttgaaaaattattaaactatacaaaactataaaagtggatcattagaatcccaaaactgaaatcttcaatattgatgaaatttattatcaattgcttatctggggggtaggcctggggagaggtttttaaatagatgtaaagggaagctttgagcttaattcctaggaacagcagccaggaagggttttaccacattcatgacgtgcttacacaggtgtaactcaaagtcacccaccaacagccagaatagtgacttcacatagctggatctggaatctagtgctaactttgttacttcagtgtgttctctgaccaaggttacattgcactcctcaacttgaaatgataccattgctgctcttcctgtctactgcaacatgaaatccattgggtatactgttaaaatgatatatgaaagggaagtggtttgatctcaaccaaaatgcaatacttgtttccagtaaaattagccacaataaattttaagtttgtggagagaaaccaggatctacaaatttgtaagatgcttaattggagaatggggagaattctaaaaaagatggtttgtctatactgggaaatgataacagatcaccccatttgaaaatgggggaaatggtaggaaagaacttgtttggcttacgtatctgatcatagtctaccattgaaggaaaccagtgcaggaactcaagttgagaacctggaggcagacactgaagcagagatcttggagaaccggtgcttactggcttgctaattatggtttgctcagcttgctttcttataccacctgggaaccacctgccaagtggtggcaatgcccacagtgggctgggccctcccacatcagtcgttatccagaaaatgccctacagacttgcttataggcaatctgatggagagatggagacactttctcaattgaggatcctcttcctaaataaccctaccttgtgtcaaactgattaaaaaacaaacaaacaaacaaacaaacaaaaccctaaccggacaggtgttaactacttcttacagatgaaaagcattgcgaaaacacattccagttaataaatggatgggaatagagttcaggtgtttgaactccttccagattgtcagctaaaagtcaccaagagttcagtgatggttctttttatccactggctgaccagatgattaggtgtgctccattgtgacggaagcaaagcattagaaatcacctgactttcgaggggacttgtgactggccttccactttttcaggccactgtttcaagtgattcctttgtttgggcctttgagctttacaaccccagagaagtaaagtttttgtagctgtgcagggtgtctactcttttaaggggagggaaagcaattgtgaaagaatctatccattatctagcagatcaaatttggaaatagaggtgaacgatgtagaaatcgatgtgggtgtagccttgaagaggtttcccaggtataccaaaacctcagagtggctcagacttccccactgttaattgtccttagatttataaagctattgcacctgttatgagatactattgttcatcattagcaacgtcaacaggcagttccatgaaagtggatgctattaaaatccctgtcctgcaatgaagggacttagcaagtaatacccagtgacatgttaaagacaaaattataacaaatctggattcacatatcttacttacgattttagattcagtctaaaccaaaaattatttgtaatgctccactaagcatcccctacatggcagcttatatcaaggttggagtcaagaaaatggtatatcaaaagcatgagcatgagcataagcacaactctataggtgtattctttgaacattgtttaagtagttggccacttctaggtatctgagagaaatcttgctctgttctgacaatgacaataattttatcagtgttcaaaccaaatagaagacctactaatctccaataggtcccgaggtgacgtttcttaactttgtgaaatgttggagtttaatagtcaaacctaataatatcttttaaaatggaaagctatgatagcattcagtgaactggaattactatttttgaaaaatattatattgacttcactacaagccagttttacataaatcagggttgtccaacaaaaatgttctgttagtcactcatgatgtgagtcctggtgtatgacctcagccagcaagtacttcttcagtgatagattagcgattggaggatccagggaatcagaagattaaaaaaaagataggaaactttggggtcaggaggtcttgcacaagctacatttcatgccaagcaagcttattaagaagtacagcaacttatctacaatttgtaagggggaaaataggacagagtctgtgggaagttatacgatggaacaaagactaatgaagcaatgagtatcgcacaaaaggaacagaagatgtacttgcggtcaagcgcatcacagatcaacctcacagtggccttgaaactggtaactttagtcactcctggggaaaagcctgtttgccaggaacctttgtcccttgactggaccttgccaagtctgcccctgaacaggaatgcagatctaggtgccccatatcctttcatcaggcctctgaggaagccttagattggtttgactctcaacagtgtgcataaaagccatgagatgtttttgcttgcagtatctatttctccttaggagcctcttaaaatgtttttggtttttgataaatttgtacaatgttctttaataatatttaccctcttcccaactcccaggtcttacctcactcagctccctacccattgaacttcatgtcctctctttccttaccacccactgctttctctttcttacgagaaaaataaaaaaatgtgaagtccaattgtgttggctgactattcttggaatgtggttgatataccaggtgtcactctactgaagaaaattgactttgtctgtcatcagagcaatagaaaacaaattaagacattgtagacactctctcaacaccaatcaaatgccaatagctcttaggcaggagtcagatttcatgctaacctcccctcttccatgatgagactttgtctggtttgagcttgtgcatgtcttatgtatggtgatgacaccatgtctgtgagctcatgtttacatctgttctgttgtgtctgaaaaacactgtttccttgaagttatccaccacctctggctcttgaaatctttctgtcctctcttccacatagatccttgaatctttaaagggggagaaacataatatagacatcccttttagagcggaacattccaaagtttcttattctcacattgaccagttgtgcatctgtgtgttaactaccatctacggcaagaagattctctgatgaggtctgaatgctacattgatctctgggtatagccatatgtcattaggaatcattttattgccatgccctttcagcaaaataatagtagtagcttttcctatagggcctaatacatgtctaacctcaagttcttagccgtattggcagtatcaggtatgggtttcatcatgtgaagcaggccttagagtccagcaaaagtagttggttgctcccaaaacatttctgccactattggatcagtgaacatatcttgtcagtcagataattactgtagttcacagcgttcgtggttgggctggattggtgttcacttttctctttcagtggtatgtctagcaccttccagtggtgtgtctagccctctgaattctaatcagtaaggatgaagcttctggttgagatagatttctccatattctatgactcaaatataggatgtcttcagctgtaaagttttactattaggttctagagagtaacaaataacgttggcaaccatccctaatattagggagtctatgggatgcctttggccagtgactcaaagagatataactaattctgggtactgggtgttttatttggtctggttaggggtatcattacacacacacacacacacacacacacacacacacacacatacacacccagtatagagtaattccatacaagctccttttatatatgtatatattttagtaagcttctacaatagtaggtgtccatgtttttttcttttttttttcactgtgtagcagcatcactgtgcagcagcatcactgtgtagcagcatcactgcaacattgtcactgtgtagcagcatcactgtgcaacagtggtcactatgtagcatcatcactgcagcagcctcactgtgcagcatccatgtttttttcaaaaggactttaatgttagttatccctcccccttatatccttcctctagcctgtcctcacatcctccacttcatttaatcccctctcttccacttttctaaaacactgtttatatttcctcttccttgaaagagtcccactaccccatggtgccttactagttccctaacctctgttggtattcttaacacgtatccaaaattcaaagattaacattcatatatgacagaaaacataaagtgcttgtctttctgggtctgggtttcctcactcagtgtgactgtttccagttccattaattttcctgaaaattatacttttaaaagctgaataatagtttattgtgcaaatgtaccacatattattatcctttcatcaggtgatgcacttctaggccctttctaattattgactattatgaatatgaacttgaatgagcaagtatttccatagtgtggtatggtctatctagataaacactttatgttttctgtcatgtatgaatgttaccctttaaattttggatatgtgtgtatatcctttagaataccaacagccagactgttctcgttccactaggctaggcagtggaatactgcggccaacagaaggtggtactcctgaccttagaggtacactcttgactgtcctcccacgtaagcccctcacatcagtgttcgacactgaggttctatggaatttaaccattaaatgatgttacacatattttctgttctgccttctgggcagaaatgaagattctgctagagcctgggtggttcactagtcagtcctgttgcttctttaacagaaatacaacagttcttttgtgttttcacatgggaacatctctctccaacaagatctcgagttccctgcagtatccagtgtactaatgaatacttgctgatctaatttcttaatgttttatctagaatttctacttggataataaggggaaaaaagaaaacaaggaaaccaatgagaaaatgaacgctaaaaacaaagaatacttacttgaggtaagcttcactttgcacaatacaaaaaaaaatccacaaaacacatttgctggacctattaaattatttgctcacacaataatggaaacttctgaaatgcactataaaattttaacttgcagttttaaatgctagttgttatcaaatgatagcaaattagacaacttaatggcttttttgtcagttgcactaaagtatgactttagacaaaatagtttgcttttaagaaattgaataagtaagtctttcactaaaaagacatgaatcttcatgaaactctctgtatcatgtgtgttccacttcatgaaactcgatatgacatgaatgtcccacttatgactcattttgacatgtatattctatttcatgactgtgacatgtatgttccacttcatgaagctcactataagatgtatgttctacaactatatgaactaaccaatatctccaaagctgcctgggactaaaccactaatcaaagaaaacacatggtgggactcatggctctagctgcatatgtagcagaggatggcctagtcggtcatcaatgggaggagaggccttggtcctgtgaaggttctatgccccagtataggggaatgccagggccaggaatgggagtgggtgggttggggagaaggggtaagggatagggggcttttggaggggaaactaggaaaggagataacatttgaaatgtaaataaagaaaataattttaaaaactggaaaaaatatgtatgttctatttcatgatacttgatgtgacatatatgtttcattcatgaagattacatgacatgtatgctctacttcatgacactcactgtgacatgtatagtctatttcatgacactgtgacatgtatgttccacttcatgaagctcaatatgacatgtatgttctacttcacaacactcactgtgacaggtatgttccacttcatgacactcacaatgacatgtatgttctacttcatgacactcacagtgacatgtatgttccatttcatgacactcacagtgacatgtatgttacatttcatgacactcgcaataacatgtatgatccacttaatgacacacagtgacatgtatattcaacttcatgacactcactgtgacatctatgtcttttctcagaaaagctctatggaatcagaagtaaggatttccaaatctttgtctttggtgaagctcttctagcagcccagatagaagtctagaaatagacatgtctaaggatgtgactctgtgagttgctcatgtactaatggctagaacacacctctgtgagcctcagtagcaaatcatatgggatcaccatagagcttcagagaggagatgaatgcccagcacctttgttggtcgccattggggcatactcaacaagtttctatttttggaagctattaaggcaactgtgctaaagaccacagcactctagaatatctcagatcatatatgggcatcctggagccccaggcaagttgcctttattcactcccaacatagggttgatcagtcttgaattaatagacttttctctcagaagttcagatatggtaaagaacttagcacctatggaaccaatttactgactctaaacagtgagtcccacagtgggctcactgcctcctgtgtttccattccctgccatgttctagaatccctagaccaaaactgaagcaggttctagtaccttgctgccatcctccagggtcctaaacatgctcttcctggtctggtcctgaactgtaatataatgggcatgtcagtggaggcccaacaatgaaaatgagacatcctttctgctccagccattagactctagaacagcagttcccaacctaaggattgaacaactcttccacaagggccacctaagaccatcagaaatgttttctctaggtggatctgcccacatacaagaaccaggtaaagcagaggaaactttaatgaactattttgactgaactatgcaatgtatcatcttttgtactattaaagcaactgttagatatttcacaatgtataattacatgttgttttgtgattaatcactatgctttaattatgttcagtttgtaatgatgaaaatgcatcctgcatatcagttatttacattaatatttgcaacagtagcaaaattatagttatgaagtagcaacaaaaataattttatgtcaggtgtcaccctgacaggaggagctgtattaaagtgtcacacattaggaaggttgagaacactgccctagtatgaattgatgaaaatgaaacaccaatgtccccaaaagcaaggacaggaagaattctgacatgtctagtgataatagagaccgactgtcatggaaaataaatattttcctgccacattcctttgctttagctgatgattagaaattaattgtctacaggagaacacctgcttgtgtgtggattgatacagttgcatgaatagcccttggggtttgatttcgaaagtatgcacagctgaatgtgaatgaaaacacaaaacctattatgtgcattgttctgctgtcatcttcgggccaaaaatccaaatatttaatatatggttggcaagccaactgctacctgaaccagaagtcactgggagaaatgtgaacagccccgttctccagctctcctacacagaggtttactttggaggatgcaaaattaaattattttgcatttatgaaactatgctgataattataatactaaaagaaaatgataactttgagcatccaagcaaaaagataaaaaataatatgaaatctatcccattgctttttttaattattgagaattatacatttctatgcaaaatttgaacatctacacacccagaaaatgttcttttccccgcttattatagtattaatcatgacatttcttgtgtttgaaaacttaaaatattaacttattttatatgtaaaattatataataatcttactatttaatggtgataaaatattaattctcttttttgttttgcttttgggtagttgtcattggttttggttttggctttggtttttagggtttcattctgtataccattctttcctggaacttactaacctaagctggcctcatacttgtggcaattctcctgcttcagcctcctcaagtgctgaaattatgagcagaagccacccatgtctggcttcttacaataaaattatactgtaaaatcaaactattactccatttttacaaaaacagaaactgggagatttagtgatgcacaggtgtgtagctcagttgcaagaattctgacatagaacccaggatcctgtacctcggacactcagtcctctcctccccattgacagacaacatacaaagcatgtgtacaatctttccaacagaactggaactattttttaaatgtgaacagaatgtgtgtttcatgcctctggattctgctttcaggaaagcttctgcggcacatccatcattgtaccagaacttgaaggagctctttatttgaaagaagatggaaagaaatcctggaaacggcgctactttcttctgagagcttctggaatttattatgttcccaaaggaaagacaaaggtctgtgtgtcagttttccctataacaacatatctgagacgatcaacttttagaaaaaacagaggtttgtctcacagctaactctcaggttatggcagaagatggaggagaaatgttgtaagatccagagggagtttgctgtgagatcgtgtctcctagcaatatcatacatgcagtctcatcaacacaaatgcctgaacataagctgagcaagggcaacaatgggcatgccaatgtggatggaggcttcacccctacacagagaactacagccaactagtaatgctgatagagaaatagtcttccccagggaagagcacaccaattggttatccaaagcaaatggtcaccctgtaaacctataatgttgtatttagaaatatgtttgtagttgccattaaagaaaaagaggctatgaatttgagagagagaaaggatgggtgtataggagggcttggagagagaacagggaatggggaaatgaggtaactataaatctcaaaaattaaaataaatatttttagaacaaatttattttggctcaattttggagatcagcctactgtttcatagaaggaaacatggtagaggaaggcattacctcggggccagaagcaaaagagagaggccagagacccacaaaccctcctgggaacaccccagcaggtccacctcctaatggctctaccacctctgaggagtgccacagccttagcatatggcccttagaggtcattctaccacaattacaaaccaacataacaaaatgaagaatcagaatggcacctgtgtgaggaagcgtctcataaggacgagatacagaaatacatcacggggtggtaaacttagctttagctatcatgtgtgaggaaatatctcatgagggtgagacacagaaatacatcagggggcagtaagcttagctttagctaccatggtcttggtaccatgggacctgtgctacaacaaaatctacacaaatctatatactacaatacaaaatcattgaagtaatttgagttttctatagctttctcttgaatatgaaaataaattccatgggtttttttttttgttttgttttgtcttttaaattccatgtattaaagtcatgggctatcaagatggctcagcagataaaggtgcctcctaccaagcctgacctactctattctgaaaatttttttcctcatattaatccctttgttctataaccattatgagcaaacttactttatctacaatctcagtcgagttagaagttttaagattttcattagatttaaatcttatattctgaacagtgattttttttccagaggcatacttaattcataatgcttttatcagagagttttagatgtcattgaagttttgcttggcaagctggaatcatcgacttgaatctacaaacatatagtaaattgttctaaatctaattttaaccctactgaggccttttctgcagagttgggacagtctggttttgttcacctataaaaagctgaggtattttttgtgtctcatcctcatgagatgtttacctctgtctagagtaggcagaacagggcttcaccaagtgaaatgcttgtagattgcagatttcctctagtaagtcttatcccagattcccaagcagggaagtcaccagtcaggtgacccaaccccaccccacccccatctctgtgtcattgtaggccactgtaggtaattcttgatgcaaggcacttgttgcccagctttgtctttttgctctggtgtgaatcttaaacctagtacttcctacttctgctacatttactccagtccaaagctgggcaggcaacattatcaagcaaaggagttgacaacagagatgtcctaagaagttggatacaaagcatataagtaagcctggagcaaacagtatgttctcaccttaaggttgagcaactgttgccacaaacattagggtggagggggagggggcagagtcagaagtacagtcattgggaaaagacacaaaaacccacagggttcacagctggtgtgcttgtctccacaactgaggatgcttgcctggaaaatgactgaccaaacaaactggccaagtaagaaatcattttgctttatacaagcaatatgaaaataaaaacataattcaaattctgtgcagagcaggagtgacacgtattgaataaacaaatgtatggaataaacacaaacattcaagatgtatattacataaaatagacaatgtttaccaaaaaaagtagttctatgaatctatgaaaattctagttgcattcatttcactttaaattcagagactgattgcaaaattactcaagaaggaaagctgtctcctaacagactccctaaaactgtgaggaacagtgatctaaaactgcatctctcagatttcagtgaaaataaagcagttataaatgaacagatcaacaaagagccgactaatgtggggaatttagtcagaattctacagcagtggggaaacgatgtagaattcaaggtaataaatagtattgaaataattgcatacccatgttttaaagtttttttttattttagcacatgaaccaaatcaaatcctcatttaattagaatgtcttttaaaaaaaactactcgaaaaacattaaaaaatatgaattgatattttcataattctagggcacaaagatatttcttaatcaagaataaaacccaaagctacaaaggagaaaggtgacagctttgacgacatgaggttgttttaaattccttatggatgataatatcaaacaagactttaaggcctagtcacgtagtcagacatttgaaacatatattaccaagtgtaactatccatcacaagtaaagacttcaccaaatcaacaacaacaaaaaaagataccgtacacagacaactggcaaagattattcaatgagaatagccaggaaaaaaatataaaaattagcttagtgaaaactgtaccatcttaccagtaaatatggtaacagattgataaaaatcagtactattgacaatgttggagggagagggtaaaaaaaaaaattcttgagaatgaaaagatggactgtaaaatggtacagccaagttgagaatatttaacaagtcctgtgcaatggaaagagaagcaagtgcagaccctcttggtcagaagttacccctttggtggctgatccacagaaatatttactcacatacacaatgtttgtataatggcaaaagctgaattaatctctaagcaattacagtacactacttaaacagttctacttagacagtgggatactgggcagacatcaagtaccaggtttgcacttgtgtgtcctggggaactcagtaactgtgtcctcataaggactgggaagaagtcaggaaacagtgtttggagtggtgtcattcttgacttaaatgtattatttgagaattttgtataatgtatttgatcacatccacctctctttcctccacttatatctacctcccttctctacccacccaaatttctgtctttttgtttgtttgtttgtttgtttgttttaacccattaattccaatttctgttgtccaaatcctttttagtgtctggcaatccgctgaagcaggactgacctatcaggagtcgtacccttaaagaaaactgacgactcctccctcagcagctttgtgcctattttccccaccccatgatgggattttgtctgacctgagcttgtgcatcggtcttgtgcactctgtcataacttctgtaaattcatatgtataatttccctgctgggtccagaaaacactgtttagtcatgtgtcacctctggctcttacaatccttatattgatcttggagtagagaacaaccctggcctgcacaatggcttgggtttcatccccattgagaaaacaattaaatacatgaatatgtatgtagttatatatgtgtatatatatatatatatatatatatatatatatacatatatacatatacaagtatgtgtgtgtaatgtatgagtaagagggtctatctcaacctataaataaatgatgatgatgataatgatagatagatagatagatagatagatagatatgattactagattaacagaatgaaagaaaatgtatcctctaaaacatgtaagactctatcagtctattttacctgtgatacctctaagggtaaacaggaggaacaggaggaaggaggagctgataaaagaaaataggtagggtataattttaattaattatgttgttttgtaattaaaacattaaaaattaaatatatatataaagaaaaatgccctgccatacataaagaaataaggtgtcccatatagtgtaatattcctgacctgtattctttattcagtaactaagtaggggttctagaatatgctagagacgacaacaaggatagtggaacaaatgtatagtcaaagtgaaaccaagtatgtagattacaggttgccattttacaacacattttattcaccgaagtctctgtttccatggcaaccctaacagccaaaggagaaagcatgaaagagcatggagccggtgctaatttactgagcatcaaatttatctctcattcttcatcctgatttgtttaatgcacaatcacaaacttgctactgacttgaaatagcaaaagtcagtcacagtgaagtttctgacagtggttagcctgttatgattgcatcagtagcaacagtgcatgatcacttgtttctgacccccagatgctgggacaaccaaccatgattccacaacagatgctgggacaaccaaccacatcatttttcattccattgcaggaccagccctgattgtcatcttttatgtaggcttgacttagagaaaactgtgttcagaagatgtttgtataaattatctaaaatttcaatattttacttactaaaagaacctttattgcagcatcaaagagaaactgggggaattagcaactgccatctcagagagatttttttttcccctgtcttttagacatcccgcgatctggcatgttttatacagtttgaaaatgtaaacatttactatgggattcagtgtaaaatgaaatacaaagcacccactgaccactgctttgttttaaaggtacgtcatgacatactcatttagacttctaagtcatttcaatttggttttttgagacatggtttttctgtatagctgtcctggaactcactttgtagatcaggctagcctcgaactcagaaatccacctgcctctgcctgaaccaatgttaaatgttatttcataaattttaagtatgatattataaaatgtgttgttttaaaccaaaataacaaagtactgtgatatctatcaacttatgtcctcaaaagctttcatctgatcctaaaaattttaatctaaatttatttaatatgcttaaataaatttatttaaatttatcaactctaaaaacataagttttatattttgagtaaattaatttaagactccattaataaaacagaccagttttcaattcttatatttttattccactgtatgaatgtttttgaaattatgatcttgccaatgttttctagaaaaacaatagagaagcctttttaaaaaattgcccaggttgtaaaccttgtttttaagtcttgtgtatcttatgctggcctcaagctggctgtgtagctgagactcttctggtcctttaatccattgctttcaccttccaagtgctgggtctacaagcagggaccaccatgacaagtttagcttgtgagacttttaaaggtgcatactgtccaggggaaatgtgtgttatcagaaatttgaggcagcttacatcttaaagttagactctcagaccactcgggtcagcaagtgggttatttttataattatgcttgagtgtcttttgacctacagagctctggacttaagactaaggtaagtttgcatttgttcttagtcttgttttgttttggtttgttttgttttggtttgttttggtttggtttggttttggttttggttttggttttttggtttttttcaagacagagtttctctgtatagctctggctgtcctggaactcactctgtagagcaggctggcctcgaactcagaaatccacctgcctctgcctcccaagtgctgttcttcgtcttaataattcagccaagtcaaatattcaataatttgtcttcatccacaattagcattgcttattgtaatcaaataattgcctggaattcgtggcttcattaagggctcaatattatgcccgtctttccattgctgtgtacccacttttagtaatttatcaataatttttacaataatgaacaccataccagcctagtcagcatgacactccctggagggtctcatccagggccttataattcctgggagacattggttatacctagagacattctgatattcataactcgggacagagaccaggcactacttcctggcatctaacagaagccagagacattagatattactaatgcaggaaacaagcccacaaccagatgacctggcccccaatattgacattgatattgttgagaaatcctgtgctcataatgtgaagctcagaaccagggctgtaaagggactgaagcaaggcagagtgctaaactcattcactcactcattacttatggagtggcagctgtgttctgagaacattccaggtgtagagaaaacaggagtaaaccaaatgtacaatgagccctattttggagtttaaggtcagtgtgaggaactgacagtgaagaaaagcatgtgctgagatgtcaggtaacaaatacagatgtgattcaaaacagggaggagtgggttagagctgaccagagctgggtcaggctcccctcagataggggcagggaggtgttgacatttggcaaaagacataaatgaagtgatatgggaattgtaactgaaggaaaacactctagaacaagaaccgtaatggtaaaggtcctggtgaggtcagaaggaggatcgccaaagacagcaccctgtctcttggattttgtgcatccatgtccattgcttatgagagggcagtgagaataataacagcaaacaattataaagcattctgttcatggatatagaacttgagctgtaagtggccaagtctgaatgggagctcagcagtgcagctcaggtgctattcttccagatacttttcaatcagatttcagattgtcagcgatggtacaggccagaatggttgccaacaacctgggagcttcccttattctcatagactgactccagtgaaactgaatccctgactctgtgcagaaaggattttaggatgagcctgtttgaagtagagtgggagtttatttgagcacacaggttgatagaaagagggtcgctgtgggcttttcaaggaagaaacgcttccatttgagtgaccttcatgttataccttaagcattgataagaaatgttttctatcttcttttcagtaaaccagagtatagcatagctccaaaggtatcttgagaggggattaaaatctgataagaccaaaacatcagccacagagtttcacaaagcagttaaaaactgtcttttaatataaatcgtatttctgctgtgatccatagaaaacattaggtttgcagctgggaacaaagaaaagccttggatatacttgagtgggattctcaccatattgctgctctctgtgagaattcatatcctagccacagttccagctactgggtatgcaaaatatccccaggctgcagtaatgatctcacctttggacagcagcagtgactgcaaatctaaggacacctcggccaccaccttctagacactgacccgacctcctctccatcctcagcaatctctccccaaattaatgacctcatcatctccacattagtcttccactcacttcttccctaacacattaccaattggcttaaagatagtcgaaatttagtgctcttgcattttaaaatcagaattgggggaagagagcttgctatgcaagcttcagttcagtgtctggaaccatagtggcaggagggaactgactcccagaagttgtcctctgacctacacacacacacacacacacacacacacacacacacacacatacatacacactcaggactagagccccgcatagtgacttccaacactaaggagtcccagtcaaggctctcctgggtagcatgagatcatgtcttaaaaaggaacaaagaaaaaaagctgagttacttcctgaaaagtctggagccatctgttctatgcctttccccaggattctggaagtttccaacagccctcgaattccttgtcttgaagctacatgacactagtccccttgttcatcagcgcacggtcatcattgtcactgtgtgtgcctgcatctatttctcttcatcttcttgtaaggaaggagagtcataggatttaggacatataccagttcaatataacttcatcttaacctgacatctacaaacttgcttcatacacagtgaggtggcatttacttttcagcggacacagatctgtaatagccacgtgctttaccaagctctgaacagagagatcagcctcagatcccttcatcttccaatccttgaagcagcagtcctgattttctatcagcgtcttccttactccttcctttgtctggtcatccttaagttcatcatctaggtcaacctcagcatcattgcagttttaaaatatcagtaacaccagagcctagaaacagtcctgcctcagctcctttccaccttagattctgcctctttccaaaccttccatggaatttattgacattctccaaacattctaacactcattcaatatgatttttcagtctttttcaaacttttattatgaaatcacagaataaccacacttttgttggcatttgtctctgcgttccatctttttacatgcctgggggttatattgtcaactcccagggcttaaacaaaagaggattttattctaatttttatcctgatgttacctttaccccaagtcaagttgtttaaccttgtctgatgctctctttcctcatttgtgagtttagaggacattaggatcccctttagcaagaatgttctgcaatggccttgacattacacactcagagcttctattattcaagatcagagacaaggatcacgaggaagattccagctggttggcattgattttgtgttttctttaagcccttttgtaagtaatttctcaatcaaaggctgagttatacagaagtaagtaaggtgaggtgaccaaggctagcattgtgacaggctctgagactttgtcacagagcccgaagaacctctgaagtgtgaacttggtgtcaaccagatagctcacctcagaaccacgaagttagaggattggaagaaatgtagtggccctttattttatattaaaagccacctgatttctgggtacaaccacgttttcctgtagttaggtgaataacatacttaaatagttcactgtgcttcttaagtggagtggacacctcgacacaaataactggtgcactttgcacagtttgcttgactcctatgatatgcacaaaacccaaaaaatggaatatttaatattaagagtaaactaaaggtaacaatatcaaatttctaaatatctctgaaggaaaaattagacactttcttcttcgtgattttactgatttttacatgtctgtagtatctatgtaaatgtatgtgtatacatgtgtgcaagtacacacaaatagaggtcagaagaggacatctgacatcttcttctaagactctatgtctattgcattaaaacagggtctcttcctaaacctgaacctcagttctcagttaggtagaagccagtaaaccccacccgactcggagctggaatacccagcttgttatgggggtgctgggatccaaacactggtagttttcatgactgaagagcaaaccctatcagttgttgagccattccctcgagctcaccctgtgctttcataggaagaatttaaatattaattactggccaatgtcctgctcacatgttagtcagagcagagactctgttgtaagtcgggcatctgaggtcctggtactgaacggtgagcccttgatttggttttgcagatttctttgttgaggatgctgcagacatctacagaacgtcacattctagctaccaagtgcctgattcacacttgaacactctgacgtttaggttactcaatgctattggaccacactacttggtttgattgatgtttccaatgtcaagatcccctttagaacgtgattattggcgtaaggtttacagtactgaaatctgagaacttcttttttttttttttttgttatcacctgattcctttttattttatttttttaaattttttattagatattttcttcatttacatttcaaatgctatcccaaaagtcccctataccctcccccagccctgctcccctacccacccactcccacttcttggccctggcattcccctgtactggggcatataaagttcccaataccaaggggcctttcttcccaatgatggccgactagaccatcttctgctacatatgcagctagagacacgagctctgggggtactggttagttcgtgttgttgttccacctatagggttgcagaccccttcagctccttgggtactttctctagctcctccattgggggctctgtgttccatcctgtagagcatccacttctgtatttgctaggcactggcatagcctcacaggagatatatcagggccctttcagcaaaatcttgcttgcatatgcagtagtgtctgcatttggtggctgattatggggcagtctctagatggtccatcccttcgtcttagctccaaactttgtctctacaattccttccatggacattttattccctattctagggaggaatgaagtatccacccattggtcttccttcttcttgattttcttgtgttttgtaaattgtatcttgggtattctaggtttctgggctaatatcatgacaagtatcagtgagtgcatatcaaatgacttcttttgtgattgggttacctcactcaggatgatatcctccagatacacccatttgcccaagaatttcataaattcattgtttttaatagttgagtagtactccaaagtgtaaatgtaccacattttctggatccattcctctgttgagggacatttgggttctttccagctctggctattataaataaggctgctatatgtatcaaaagatggcctagtcggccatcactggaaagagaggcacattggacttgcaaactttatatgccccagtacaggggaatgccagggccaaaaagggggagtgggagggtaggggagtggggggtggggggtaatgggggacttttgggatagcattggaaatgtaaatgaggaaaatacctaattaaaaatttaaataaataaatagatagataaggctgctttgaacatagtggagcatgtgtccttattaccagttggaacatcttctgggtatatgcccaggagaggtatggctggatctaccagtagtactatgtccagttttctgaggaaccaccagactgatttccagagtggttgtacaagcttgcaatcccaccagcaatggaggagtgttnnnnnnnnnnnnnnnnnnnnaaaagatggcctagtcggccatcactggaaagagaggcacattggacttgcaaactttatatgccccagtacaggggaatgccagggccaaaaagggggagtgggagggtaggggagtggggggtggggggtaatgggggacttttgggatagcattggaaatgtaaatgaggaaaatacctaattaaaaatttaaataaataaatagatagataaggctgctttgaacatagtggagcatgtgtccttattaccagttggaacatcttctgggtatatgcccaggagaggaacaacacagtgtggggcagccatccaaaagtgtttgccgccatctcctggcgcaactggagaactacagcaacagtctgcatactggttggcgtcgtcaggaaagaggaatctaagagggacaatcaaggaactagctggcttccaggccaggctgatgcaaattccgagtcagtaaaggaagcaatccaattaaaagggtcaacttttctcagttgctagaaaagaccacagacaggaatcctttacattttctgttgttttattcctgtagtatctttaaaatacagtgctgtcttcaatgactcaatataaactcagaaattctagtggataaagaaataaacaggaagctctccaaatatcaatttttatcatttttaaacacagaaataaataaatttagaaataactaaagcccttgcagactatgtgtcttgcagaggatcgatgtgggacacaacaagcacaaagcttgcagggaaaccacaccatatgctctccctcatattccagcatattaaaggcatagctcaaaagctcagatcacctttgacgattaactactttcctaaaggtcagtgagtttgctcaatgcaagtggaagctctatgaagcaccgtagagagggattgtggcttcagcccgtttctgccaatggaagcctcctagatctcctgatagctctgatctttagtgccactagtttatgctcagactagcaaggccaacctgagcttcataaggctgctctaaggaaacacaaacacatacacgcacacacacgcacgtgcatacacacacacacaaaaacagttgttttagttggtatttttttatacaataaaatgtaatcgaagttacaatggcccatgaaaattgacatcacacacatttcagatcctaggtttggttaccagcctctgacccaatgacttcaacttttctgatataagagtaaatactatgcttatttatatatttaaaaaattattttgacacccagattaaggttctactacatgccaggcatgtgctaagcaccagggatcttccaaaaaaaataatacaggcaaagttcccatctgatagagagctgaatatgtaaaagccaaacagaaacaaaagctacagggactagagaatccagaaacagagttgcaatctttttgtgtctgccacatcagtgttctcttgtaaactcctgggggcctatataacccctgtacacacactgttgatggccacttaaggacagatagaaacactctgaatgccatcatgcctgcagaggatgtgcccaagtggatgtgaaaccaccattaggaaagagcgatagatcattgcaaaactctgtattcttgttgaaagaaatgacacctggactaaattttggcacaaataaaactaattttataagcaccagttttgtaacgtaaaatgcctactaggtaagccccttatatgatagagaggcaacctgatttccaatgaggaacagacatataaaatatataacggatttcagcatttagaagggagaaatacaattattactgacatataagaagtccttatggttaaagcatataacaggctccttaaatctgatcagagttgggcctctttcttaatagtgctggggggtgaacccagggcctcacagatgataggcaagtatgctgccactgaactatacacccagccttttcagtaccttttacttttgaggtagggtctcattacatttctcaagcagatctcaacctggtggtcctcctatctcagacacctctctagtagctgaggttgcagacttgtgctgtggggctgccagtttagcagttcttaaaagctgggtatgctaacatgtgatctcagctatcaggaagactaaattggaaaatcatgagttcaaggccatcctgggcttcataatgacacctcggctcttcctgatcctaaaactgcctttgccaccatctcagtaaatcatatatattgtcatagtttttctttgagtttttttttcaaacagtggtttgggctcttaataaattgcatctattaattgtcttcaaaactgcttctttgtagcatcctcaaattcagaaggaatctcaatatatcaagtatctctgctgtgatgacgcaagaactctcagtcaatgggtaatgggaataaggatcgccaaggtgagtatgtgctcaccttcatgtgttcttgggccagccaagaagcttgttaactaaggccaacgtttcagcatttctgggtacagatgttatctcgtctatttgttcttgatttctttctacccatcagtaagtggagtcattcacttactgccatacaagcacacacctgtcctctggcaagagaatcagagttgactttaaaaaaaaaaaacaactgttcatattcacagggagaattgcaaacacaggtgtgcagataagaaactcgagaccaggccaaaggtctgtgccttaatggtaaagcacttgcctagcatgtgtggggtcctgagttccatctcaccatagaaagtggagagagcaaacgaagccgattaactcaacagttacatgatcagaattttgtgattggcattttgtggctatccctgtcctctagtgtgtagatgggagaatttgctaattttgctaatctagagaattatttaacatttgaaagagcaatcaatgaaatatacccccaaaatgcaacttggatgagaataatggcacctttttttcttccaatatgtatcttgcagttgagtgcaaaatttaaataaatggattccttcttttcttctctgtattccctccttagtatgggaagactctctatgataactatcagcgggctgtggcaagagctggacttgcctctcggtggacaaacctggggactgttggtacaccgatgccagctcagccttctacaggtaaaagcagagaaaacactcatgttcacacatcaacaaaaccggagcctagctccagtctccaggttacacccaaacaagaccagtgtctccaagttattcctccaacaaacctgcacccccaggttacaagccctccccctgcctaatgaccaccaatacagagtgaagcagaaattaagtttatgatatactcgcagcaccagccaattatgttaaaggccatagtaactttccagttagatgcttgcacactcacttatagccttctataaagtcttgtctggtagatcatccgtgctccttctccaccaaaccatcctgtgtgatggtggtgtgctgagggacccaagctagctcaaagagaataaaggccctactgtgatttcataagatcagctcctgtctgttttttagggggattgctaacatttccctgacactacaatccttgtgtctaggttgtctaccggtgacttttcacaaagctttggccactttttcacaataaatccataaataatgtgatgatcatgattttagggtgggctaaaaggaggtgtgctttatcaaaaaacaaatatcatataaatatattatatataaatataatgcaaggtgccttagtgtcaagcaggatactcagaagatatctgatcatgccctgctgtcttcccgcagtgacaggatggctagagtctcatgccccatgccaggcattacatgttaaggcataaaaccttgtcttgttggtatttttaagaagaccagccactaaggttaggtacccagtgagctttctgctttacatagagaactgccctttggtatctgagaccaattctaggaagcccattagcactctacaagtactgttatactgtagtgtttagtacaaaacaacaaagaaaaacctgcatgtgttcaataaaagccacttattttcaaaggtcagtggttgattgaatcatcgatacaaaacgtacaggttgtaactgttccacagcatgtagattacaatcccccatttcatagctcaaggaactaaacatgggaggaggtagcatggaatatagatagaagctagtatctgatatacagcaatacaattcaaactaacaatgaaccatgaacacacacacacacaaacgttaggtgcatgtaattctaccatgtgcttatttgttttcttaacacagaaaattaaatgttggctggatagttgactgcagggcatagaacatcttcagtgtttcttagagctgatccatattctgattttgtagtcattgttgctaagaacaccactttttgcacaaatacatagtgtaaaaattgacaggagtatgactatggctgttttagaaaccactggaaattctgttctaatctcaagttaagatccttctaatcatttcatgaaccaagtcagcaactcaaacagcaatttttaatattattttttatcctgagaatttcatacatgtatacaatgaaacctggtgatattatgtcccataattccctccccatcccccatctcccatcccccaccccccgtgaatcccctctcaattcagatactctttttttttttttttttttttttttttttttttttttttttttggggagacattaagtctaactagtgctttctttgtgtgcttggaggtaggaatatccaccggatcttggaaaatctaccagtggccacacatttttaacaaaatggaattctccctccctcagcagctaccagctgccaataacccctcagtaaagcataggaactatgctatgcctgaattgtggctgactcactcttgtacaggtcaacacaacctgtgtgaactcatgggtgccatggccatgccatgactagaaggcagcatgtcacagcctgcctcccatctccccattctgacagccttcccctccttctcagtggtattccttgaaccttggtgtagggaggtatgggggccatggagggggggaagaggggagagaacccgtgtcccaccagagttctgatgctctgggccggcagatggcagacgtgggaggactgctgcaagctttccatgcgacccgggtgcgtgtctggctgtgtgaagccatggacctcatctcggtgggtggtggacaagggacagtcctaggcactaggttcccagcctctggcattccacactggataccatggaggagctgagaacaaacgggtaggccctggtggcttggtcagctccggggctgaaggaaggagaggacgggggacagggcgctgggtggctctcacaagggcgagagtccttggtctggtctgtggctggagcacaggaaggctttctggcaggaggttagatgtggctccttaggagaaagcctattccatctttcaagcatggcgggccttgatgagcagagacagtctatggttttagagctttattgtagaaaggcagggagaaagagagaaggtagaaagagaagaaggactggccatggccacgtgggggtggggggggagtagggctagagagtaagaaaggtgagggcttaaagagagtgaggaggggttaagcagaccctcttatagtgggctgggctatcttgttgttgccaggtaactgtggggaggagcatacctggctatagtcaggtaactgtgggggtggagtctagccagaatgccagaagcttgggacattgtctgcatgattgatagtcacagaattatggagttgggggctctgtggtgtcaggcacctggctctgggaatgtggctcacttttctgtcccttgtagagttctctactggggtcactggagcaagcctcattcaaccaagataggctgcctatcacagtcccacagggaggagcaacaaagatgtcccattttagggctgagcactccatctctaaatctctgcctttgatcagtaatgaatctgtccattgattctgcacactgaaaaatcttagtgtttactgaaagccttatgatttttgactaaacacgagttttcacacatacaaagtatgtttgtttttagatgttttatttattattatttattatttttatattttattgattcactttacatcccaatccaatcttcttccctaccttgctctcttcccagtccctccctctcgtttcactcccctcctagctcttccccatctccttagaaaaggggaggcctgccatagataccaattagaataaccaggcatagcaaaccacagcaaggttaggttgctttctcttcccctgagtctagacaaggcagcctaattaggaggaaaggatccagagccaggcaatgtagtcagagacagccccagctcccattttaggagtcccacttgaagacctggctgctcatctgctacatatgtgcagagggcctaagttcatcccatgcatgctctctggttggtggttcagccttcctgagcccccatgggcccaggttacttgactctaggtttttccctctgcaaagcccattcttaaccacagaggctacacatacctcagaccgcacctcagacttttcatgagactgtgaaatacttgactttgtggaatacttgtcaatgtttccttttgcagtgctttgtatttgcagactctccttcaaacatactaaaaatgtcttctctctctcctctcttcagtttcctcaggacttaaaacaggcaccagccagcccaatggtcagatgccccaggccatcccttctgcaggtcctcctctgcaagaggcccagacacaaattgaaacgactaaggtaaatcagggatccactcaaaggttgtcgacctgatacctaaaagcccgcctagttctaaatatgagcaggtcctggactttttctttttaaaactcaaatgcaattctaacaactgggaagccactatgctataatttcatttaggaaatggcttcgtattttatcataaagcttccgaggctagaggtgaaagttaaaatcagccattaatgacactgctttatgatatcctaagtgtgtgtatcctaagtatgatatccaaaggggtttccttcatgtcataataaatttcacgtcctttcagtgagcccttgagactttcaggtgttttgttttgttttgttttagtgaattaaagcaattgaaaattagtcgggaaccctatatgaagtgccaagtgaaccccaagaccggatcagaagattcccaaaaggggtccacttataaaatgtgcattttatatttttcacttaatgacttgaatacatactcagggtgatggaaaagaaaatacatttaaaataataaccaagagctaggggtgcagatcagagacacagcacgtgccctatatgtgtgagggtatgtgggctccatagctagcacagacggaaggaaggaaggaaggaaggaaggaaggaaggaaggaaggaaggaaggaaggatggaaggaaggaaggaaggaagaaggcaggcaggcaagcaggcaggctgaaatataacatcctccataactttttatataaaagagactaatgaagattaatttaaatttgtataaaacccatagatgcttgtaatttagttattaatccaattcaggtgactcttgaatttccactgagtgtttcttgtggtgcagtacagctcagactaattgtggtcctgtcctatcacccacatattacaatccacgtgcacaacttcaataattttcttcatccacaccttcaaaggtaaaagtgaaaattggtgttcacttaaagatttgttgtttttgaaagccatttcagacttttaaaagctgtttctctaatctatccaaacctgagagtctgaccaggcagtgttctttctgttatattttcattatttctgtaacattagtcaaaaagaagtatttttttaagaaggaatgaaagaaccccagaatagaaataatttctttgtgaatgccaatacctaatctgcctgatccaaaaaaatcaagaaataaatcacaagtttatgagctttgcatgctaagtaaataaatgaaacacaattgaaactcattgaaaagtactttgctagaagaaaaaaaaaaaaacctaaatttaatatctagtagttcaggctgttaagcagagaaaaaaaatgctttaaaagctgataaaaatgtaaattaaagtgatgatggttttcaccagaacatagtcattcaattcagctgcctgaaattgctggggacgttacatttatataaatacactgttacttaaatacacattgttattgccattgtcaagtcctctattgaacgctgtagaccttagagtctagagagacttaagccaggtcaagtgttctgactctagggcttatctcactataacatgaggcagctcatgttcattgtatacctgaatttcataacacacaagcacgcactcacacccacacacaaatgcacacacacaattttagactatgtgtcctgcttccaacctctcccttctggaaccttctaaggtacaaggacaaagtttatgatcaactcctccttagaagggcagagtctaggaactggaacctttgttctaagaacagtgctgcatggaaatttcatccacaaccaagggaaagattggacacactctccagcaggaagagatcctttatggctttgtaaaagagttacctgtcacccagacaggattacttctcagtttcttcacttgtacattcttcatcctaaccaagcaggctgtctaaacaaagaggatttcttttagcataatattctttatttattctttgagaattcacaatttatctcaagcacatttatcccccatccccccattccaactcctctcaaataccccctcactcccacacactcttccttctcaactccatgttcccttttttcttataacccactgagtccagtgttacctatatactcatgggtatagggccatccactgggtcacagtcaacctgccagggaccatagccctaaggagaactgactctccctcctcagtagtcagtcgatcctcagctaggggtaggagctcctatacttgtgccagctgtgctggaaagtccactagctggatcttatgcaggtcatggcctgtcatgtccaggacatactttcaccctcatcttctccaacctctggctcttacagtccttttgcctcttcttgttccagagaactgagtcttggggggggggggggagggtgtattacaaagatgttccatgtatgagtgagcacgtcactgatacttgttctccgcacctggatcagtgtgagtctctgtaatgactgttggccactgtgcaaagaattttctccgatggggacgaagcagcactaacctaaagatacagagagagatttagaaggcagtttaaaactttgtccatttagtaaaaataatagtatgttcacccctagagtctgtgagctctttagccaagtgcttcactagattttaagccaagatattttggtgaacactctgagatgccccttaattacctctatgctgtcaacggtgtggcacagagggatagttcactcacatatactcatgcacacacctaaaattgtgttcctgcatatgcccactgatagcttgccttaggtcaggagtagggagtcttagagaatcgtctggtttccagtttgagttgagttaggatttattagtactttagagagacatttaacttctgtgtaagacttgctagggaaggtctgtgcttgtcctaaacacagtaaacacctcctagagtaaatgtggttaagatgcccagttacagagcgtgctgttttagtgctcacatctaatgatgtgacagacatttggaatcattcctgtgcctggagaaaggtgagctcatgagcacgttaagacccagtgtaggaaggaatggggcaatcccatcagcggcaatgccacatgatggatgtactgtcaagaactgtaagaactctattgtttctttattgaaggatgaaaagcaaggcttgggtaaccattccccaggagcaaccagggagaaccaccgtcctaagtccagcctgccaccgccaccccctccagtaagacggtcttcagacacctgtggcagccccgccttgccatccaaggtcaagggccctggcacctgcaccttcccccacccgccggagaacttcctgccacctccaccgcccccaccgcctgaggaggacaacagcgggctactcccgccacccccgcccccgccctacctggaggagccaccagacttcgtgccaccacccccaccgcctgcagctgttgaagactctgcattgccacccccgccaccacccccgccctgtctctcccaggagataactaagtcatctccgttgccccccaaaaagcccctagtcccccccaagaggcaagagaaccaaggactccccggtgcaccagggaacagtgagcaagattttatgtcagacctcatgaaagcattgcaaaagaaaagaggcaatataccctagggacatgttagtatttgggatgctctctattaaaattcatgttttggtactctattgtcatatatcttgttcattttagtaaaatgttttccgactagaaataatgtaaaatctcttcactgttgtgcatactatgttcatagccattaaggtagccatattcagggtttctaactacatatatccaagcacacccacatgtacatcctgtgtgctttcacatgatacatttttgtcttgcagtccaggttcactgaaatgatattctgggtatgttttcgtgtgttcagaaggctcaaattttaaaaattaaagtttgtctgaaaacagtatctctagaaacagtgtgtaagttttatatggtgtcagcactactttagatttgactctctaaaagtttcaaattcctatgccttcttaagtcttgttctatttccttcttggtgtctaacctctgacataacaaaatggaggtggggaggagagaaagaaagcagatgtttcatttcttttatacttcttggttgattctatctcaggcccaaatactgcttttatgtgtgggtgggtgggtgggttggttctgaagggctgggaatgaacccatgagtgcctaccttggcaagtgtacaacaaacacatagccaacttttcacttttttggttttttctttcctaagtttgaacaatgaccaggcagacacacacacacacacacaccacattagcatttgtgtgtgatatatctgtgtgagtgcatgtgtggatactttatggagagagtccactccctcctcctgtatgtggatctgaggcttggatcctcatactggcttagcaagtgctctactggaccagtctttgttttttaaatggatggacaaagctatacaaaactggacagtttttgttttgtgactctttagatgcagtggtacaaatatccttcagataaagcaacaggaaaagacaggctggtgtgcatcctgtatcctgatcgtgaactgcagaaatttaagactcggcatattctgtgctgggtgagccagctttgccttctctaattggctcctcggtggccttgtcgaactttgaagttgacttcacgactctgcttttgttcctaattatattttttcatttaaaatctttagttcccttagagtatatagaagataaaaataatatattttttaaactaaagataatcaatcttagttttcaatatttggaaagaagttagctctaatattttaaatgaactcagttctaaaactaacatatctagtaattaaaattagtaaagcaagaacgcagaaagaggggtacctcgacgaaagtgagctcaaatgttcttgagcaagaatttgaaattgaaggtaaacaaacactttatttcaaatctcaccccacacacattagatcattcatgtttaagttttatggttttataacagtgtagtaaaatcataacttcctgattctggctgttatgcagatccctggaacaaggcaggcaggcatgatggcatgcttctttagagagcagttcagagactaagaatgatgagtgtggccacacagacttaaatctgatatacattaatgaatgtggtccactttgcttaaatctgatataaattaatgaagctattacaaagagctcaaattgaatggtcctttataaggactgtaatctgggttcacaaatgtggatcaaaataagcacccagaaccaggtgtggtggtgcatgcttgtaatcaagtcagaaagctagtcttggctgtagcaacacctggtctcgaaataaaaataaaacaataaataaaactactacgatgattgcagatcaggagcatctgttggaattctggtcacctggaatctagagtagagtttcacttagtttatttgagagcattcaaactgagggagggattcatagtcaaagctatagaaggaagtacagattcctgtttgtcagctgtgaagtcttgagaatgaaggcaatcaggaaatgatccagtacactccgtgaattaaagttctgactttatgtaaacaaaatcacctagtgcaactaaatgcaaactaaaagttcatctctgtgatttaagaagcctggatcaagcatgcatctaagcaccctggtcccaaaacaggttctgaaaaattcttagctctcccctcttttcccagcttagccattatttgtacatttgcttcactgtatctctgcaaactgcaactttctatcaactgtccagagcttttccctaactggaaagactttctgaaaacatcagcagccagagggagtgaagaattgttccttattaagctatgtgtaatgagaacatgaggctagtgaaagaggtgctaggaactcatcattgtggaccaggagagggaaaggaccaggacctgagttccttggggataaaagggggtatacagttgtaatgggcttcataagagacccccaacgcatgcaggccccacagggctggttcacatcctatctcctaaattctacttgtaccagactttttctttatataacagagtatcagggtccagtcttgacacaggatcgtagttcttaactggaagcaggaatatcttgaaggcccacaaatatcttgaaggcccataaatatcacagactactttttgggtacaaactgacaggcatttttttcaaggcttaaagttgcttctctctctctctctctctctctctctctcccttctcttcctctctcccttctctccctctctccctctctcctctctctccctctcttccttctctccctctctctcccttctctccctctctcctctctctccctctctccctctctcctctcactccctctctccctctcccccctaactccctctctccccttctcctttccctccccctgtgccccacgtccccctccactctgttttatgcctcatgctttagacttcctgagccccaccctctccggcgtctccggatactgctcgagtgcagcattccttgacgtcgggtgtgctagttttgcacattgggccccgccccccctaggaggccctaccagggaccccccctgtggccctatttggccaccacccctttccctccttttggccccatctctgcagggagggaaacagccaaccgcctcttccttgggggaggtccccaatgccgtagctccctcctgcgaacattttcctcccacttgcaccggccagccctcccctcccttcccaggaaaggtttccaccagccccctggagaatgtgcccagaaaacaaaaaaaannnnnnnnnnnnnnnnnnnnctctgcttttctcctgtgcatatttcacacacaactcacacacacaccacatgcactctccttgcatacactctccatacacacctcacattctgtcttcacacactcttcacattctttctcacattctctctactcactctacactcacctcatgcacacttcattctcacctcacttgctcttcacatgttcactcaccttcttcttgccccagtcttttactgatactccaaaagcatgtagaaaaaaagagttgtataatatcttccaaatcaaattcaaaagaataaccacatcccacaaagaatcaagaattacaattgttccccaaagtttcaaactcccctaattcccaggcctgtggccaaaacaataataaaattgcaaacatcattatttaaactttaacttttaacttattaagctttatagctctgaactccaagatcaactagttacattttcctgtgaagctctaatgataaacgacatgggcaaagctgccaggcagtgaccagaaagaatcaagttaacccttaactcagtagttctggtagctttctgtgtctgcacattgcacacaatgactctcctaagaatcccagtgttttgaattagttttattaggatataatattgtgcattgtatacttgtttatctaggaactactcttaaatgttgtgcaaaacttatttcataacttcaataatcttttcctttcttggggtcctaatgttggctctatttcattttctaacaatctcttcaaactttttctgcaagtcaagcattaatctagaactaccattgtgcagttattgcattgtttccaagacgagaatacacaacatgaacctgtgttgccaccagcagccacgggttactgggttcctgaaaggaaagctggggatggatgggaaggaaagagaaataacgaaccaagacaaagttctctgctcaaggctcaatgtttcaattctagggtctgaacttgaaggggagaaatgaatccctcactttgccaggacctcatcaggaagacaagctcagttgctcagcaggtagtggcttcttgcaggaagctgcagatgtggcaggacaatagactgcacctaggtcagaagtctccaccctaggtgggctagccacctgtggcaaaacaaggtctgattcagcctgctcaaggctggggagagggcatacacctgggccattaggactgtgctgtgctatgctcctatgcctcaacttttaattgcttaagaattattacagctgggcagtggtggcacatgcctttaatcccagcacttgggaggcagaggcaggcagatttctgagttggaggccaacctggtctacagagtgagttcccaggacagccagagctacacagagaaacactgactcaaaaaaacaaacaaccaagaatcactacatcaggaacatctagtttcacagaattcaccagaagaagaagaaataggaaagtcagatataatagaaaaattatacacaccaaggccagctgaaaaactttacacacagatgaaatctatacagccacatgtccaggaataaggttatgagaaatgggaacaactgttgtttacaaagagctgctgcaggctgagatgtctccatccctgcctaccaaaggcagtcccttatttcagatggcagatcctctggagggatgtgtctcctgcttctcagggtcccagacaccacccttttttacaaggagctgcatcaggcttctgagatgactccattccagcctgctgcaggcagtccctgtcatggtatgctgtccccagcaagaaaggactgtaaaaactcaaagtgagagttcctgtctgacagacttctgctctgggtggttattctctggacagcagaatatctcaccatctcccttcacccctgagagactcccttggaccaggaagcagttactgtcttccgcctgaacccagtggagagtgccaagggccccagaggactctccatgccacaagacccctaccacatggagaacctcatgatcacaggtgagtggaatgcaacatcagctccaaagaatcacatagggtcttgtgccagcaggaacagggacaaagaaaccccacctgacaagaagctggaattcattccagccagggccatccctgccatcttctgcctgaacccagctgagggaaccaagggccccagagaactctccatgcaacaggacccctagtacacccaggaacacgtgatcactggagagcatgtgggcaacagaagcaacagagcttcttggacagggtttctttgggccttcatccacagccaggaggctgagctgagacccagacccctggacaccttccttgccagaggagagtggacctacagggaggactctgaccccaggactcaggaggtgggtcagagcgccagacttctggacacctgccctgaaagaggagagcttgcctgcaaagagttctccaaccactgggactaagagttggactcccaggaggctaacagaatcacaggaagaacaagctccagccagagacaactagaacattaacaccagagattaccagatggtgaaaggcaaacgaaagaatcttactaacagaaaccaagaccactgagcttcatcagaacccagtatacccaccacagtgagtcctggataccccaacacacccgaaaagcaagacttggatttaaaataatatctcatgatggtggtagaagattttaagaagggcattaataactcacttaaagaaatacaggaggacactactaaacaggtagaagtccttaaagaattacaggaaaacacaaccaaacaggtaatgtaattgagcaaaaccatccatgatctaaaaatggaagtagaaacaataaataaataaatacccacagggagacaactctggagatagaaaccttaggaaagaaatctggaaccatagatgcgagcatcagcaacagaatacaaaagatggaagagagaatctcagatgcagaagattccatagagaacacggacacaacaatcaaagaaaatgcaaaatgcaaaaagatcctaactcaaaacatccaggaaatccaggaaacaatgagaagaccaaacctacagataatagcaatagatgagaatgaagattttcagcttaaagggccagcaaatatcttcaacaaagttatagaagaaaacttcccaaccctaaaaaaagagatgcccgtgaacatacaagaagcctacagaactccaaatagactggaccaccaagaaagaaatttctcctgacacaaaataatcacaacaacaaattcgctaaataaagatagaatattaaaaacagtaagggaaaacggtcaagtaacatataaaggcaggcctattagaattactccagacttttcaccagagactatgaaagccagaagatcctggacagatgttatacagacactaagagaacacaaatgccagcccaggatactatacccagcaaaactctcaattatcatagatggagaaaccaaagtattccatgacaaaaccaaatttacacaatatctttccacgaatccagcccttcaaaggataataaagggaaaacaccaacacaaggatagaaactacaccctagaaaaagcaagaaattaatccttcaacaaacctaaaagaagacaacagcaagaacagaatcccaactttaacaacaaaaataacaggaagcaacaattacttttctttaatttctcttaatatcaatggactcaattccccaataaaaagacatagactaatagactggcaaaacaaacaggacccaacatatgtctccttacaggaaacctacctcagggacaaagacagacactacctcagagtaaaaggctggaaaacaattttccaagcaaatggtcccaagaaacaagctggagtagccattttaatgtcgaataaaatcgacttccaacccaaagttatcaaaaaagacaaggaggagcatttcatactcgtcaaacgtaaaatctaccaagaagaactctcaattctgaatatctatgctccaaatgcaagggcagccacattcattaaagaaactttagtaaagctcaaagcacacattgcacctcacacattaatagtgggagactttaacactccactctcatcaatggacaggtccaggaaacaaaaactaaacagagacacatggacactaacagaaattatgaaacaaatggatttagcagatatctacagaatattttatcctaaaacaaaaggatataccttcttctcagcacctcatggtgtctcctccaaaattgaccatataatcagtcacaaaacaggtctcaacagatacaaaaatattgaaattaccccatgcatcctatcagatcaacacagactaaggctgatcttcaataacaacataaacaatagaaagctaacattcatgtggaagctgaagaacactctactcaatgataccttggtcaaggattaaataaagaaagaaattacagactttttaagagtttaatgaaaatgaaaccacaacatatcctaacttatgggacacaataaaagcagtcctaagaggaaaactcataggcctgcgtgcctccaaaaataaactagaaagggcatacactagcagcctgacagcaaacctagaagctctagaatgaaaagaagcaaattcacccaagaggagtagacagcaggaaataatcaaactcggggctgaaatcaaccaagtggaaacaaaaagaactattcaaagaatcaaccaaaccaggagctggttctttgagaaaatcaacaagatagataaacccttagccaaactaactagagggcacagggacagtattctatttaacaaaatcagaaatgaaaaaggagacataacaacagaacctgaggaaattcaaaacatcatcagatcctactgcaaaaggctatactcaagaaaactggaaaacctggatgaaatagacaacttcttagacagatactaggtacctaagttaaatcaggatcagattaatgatctaaacattcccatttcccctaaagaaatagaagcattcatcaatagtctacccccccccccaaaaaaaagaaaaagcccaggaccagatgggtttagtgcagagttctatcagaccttcaaagaagacctaattccaactctcctcaaactattccacaaaatagaaacagaaggcactctaaagaaagaaaacttcagaccaatttcccttatgaataccaatgcaaaaatactcaataaaatcctggcaaaccgaatccaagaacacatcaaaataatcatccatcatgatcaagtaggcttcatcccagcgattcagggatggtttaatatacggaaatccatcaacgtaatccactatataaacaaactcaaagacaaaaatcacatgatcatcttgttaaatgctgataaaccatttgacaaaatacaacaccccttcatgataaaagtaatgcaaagatcagcaattcaaggcccatacctaaacataataaaagcaatatacagcaaactagtaaccaacatcaaactaaatggagaaaactcaaagcaattccacaaaaatcagggactagacaaggctgcccactttttccctacatattcaatatagtacttgaagtcctagccagaacaatttgacaacaaaaggaggtcaaggggatacaaattgtaaggaagaagtcaaaatatgactatttgaggatgatattatagtatatataagtgaccctaaaaatttcaccagagaacttctaaacctgataaacagcttcagtgcagtagctggatagaaaattaactcaaacaaatcagtggcctttctctacaggataaacaggatgagaaagaaattagggaaacaacacccttcacagtagtcacaaataatataaaataccttggtgtgactctaactaaggaaatgataaatctgtatgataagaacttcaagtctctgaagaaagaaattaaagaagatctcagaagatggaaagatctcccattctcatggattggcaggattaatagtcaaaatagccatccggccgaaagcaatctacagattcaatgcaatccccatcaaaatttcaactcaatacttcaacgaattagaaagggcaattttcaaactcatctggaataataaaaactcctaggatagcaaaaactattctcaataataaaagaacctctggtggaatcatcatgcctgacctcaagctgtactacagagcaattgtgataaaaactgcatggtactggtatagcgacagacaagtagaccaatgaaatagaattgaagacccagaaatgaacccacacacctatggttacttgatctttgacaaaggagctaaaaccatccagtggacaaaagacagtattttcaacaaatggtgctggcacaactggcggttgtcatgtagaagaatgtgaattgatccattcttatctccttgtactaaggtcaaatctaagtggatcaaagaactccacataaaaccagagacactgaaatttgtagaggagaaagtggggaaaagcctcaaagatatgggcacaggggggtggggagaatttctaaacagaacagcaaaggcttgtgctgtaagatcaagaattgacaaatgggacctcataaaatagtaagcttctgtaaggcaaaagacaccgtcaataagacaaaaatgccaccaacagattgggaaaggatctttaccaatcctaaatcagataggggactaatatccaatatatacaaagagctcaagaagctggactccagaaattcaaataaccccgttaaaaatgggatgcagagctaaacaaagaattctcaagtgaggaataccaaagggttgagaagcacttgaaaaaaatgttca

SEQ ID NO: 1153 - DNA, 2425 bp, Mus musculus
tctggctcagccccgcgcatctctgcacagcctcctcgcatctctgcaagcccccctcgcaccctcctcccagcagtcaagatgggtgaatcaaatgaagacatagaccagatgttcagcactttactgggggagatggatctcttgacccagagtttaggagtggacactcttcctcctccagaccccaacccaccccgagaagagtttaactacactgtggggtttaaggatttaaatgagtccttaaatgcactggaagaccaagatttagatgccctcatggcagatctggtagcagatataagtgaagccgaacagagaaccatccaggctcagaaagagtcctctcagaatcaagatcgttttgcacttctgagggcttcggatggccagggtacagcctcaggaggttatggagcaagtgctgctgctattgatgttagtcaccatgaggaagctttaccacctccacccgtagaacccatgctagaccttctgcctcctcctcctcctcctcctcctcctgaacttctctctaaagaagaagaagaagccaaagcaaaggctgataaaattaagttagcactggaaaagctgaaggaagccaaggttaagaagcttgtagttaaggtgcacatggatgacagcagtaccaagtcactgatggtggatgagcggcagttggctcgggatgttctggacaacctttttgaaaaaacccattgtgactgcaatgtggactggtgcctttatgaaatatatcccgaactgcaaattgagagagtttttgaagaccatgaaaatgttgttgaagtcttatcagactggacaagagacacagagaacaaagtactgtttttggagaaagaggaaagatatgctgtgtttaaaaaccctcagaatttctacttggataataaggggaaaaaagaaaacaaggaaaccaatgagaaaatgaacgctaaaaacaaagaatacttacttgaggaaagcttctgcggcacatccatcattgtaccagaacttgaaggagctctttatttgaaagaagatggaaagaaatcctggaaacggcgctactttcttctgagagcttctggaatttattatgttcccaaaggaaagacaaagacatcccgcgatctggcatgttttatacagtttgaaaatgtaaacatttactatgggattcagtgtaaaatgaaatacaaagcacccactgaccactgctttgttttaaagcatcctcaaattcagaaggaatctcaatatatcaagtatctctgctgtgatgacgcaagaactctcagtcaatgggtaatgggaataaggatcgccaagtatgggaagactctctatgataactatcagcgggctgtggcaagagctggacttgcctctcggtggacaaacctggggactgttggtacaccgatgccagctcagccttctacagtttcctcaggacttaaaacaggcaccagccagcccaatggtcagatgccccaggccatcccttctgcaggtcctcctctgcaagaggcccagacacaaattgaaacgactaaggatgaaaagcaaggcttgggtaaccattccccaggagcaaccagggagaaccaccgtcctaagtccagcctgccaccgccaccccctccagtaagacggtcttcagacacctgtggcagccccgccttgccatccaaggtcaagggccctggcacctgcaccttcccccacccgccggagaacttcctgccacctccaccgcccccaccgcctgaggaggacaacagcgggctactcccgccacccccgcccccgccctacctggaggagccaccagacttcgtgccaccacccccaccgcctgcagctgttgaagactctgcattgccacccccgccaccacccccgccctgtctctcccaggagataactaagtcatctccgttgccccccaaaaagcccctagtcccccccaagaggcaagagaaccaaggactccccggtgcaccagggaacagtgagcaagattttatgtcagacctcatgaaagcattgcaaaagaaaagaggcaatataccctagggacatgttagtatttgggatgctctctattaaaattcatgttttggtactctattgtcatatatcttgttcattttagtaaaatgttttccgactagaaataatgtaaaatctcttcactgttgtgcatactatgttcatagccattaaggtagccatattcagggtttctaactacatatatccaagcacacccacatgtacatcctgtgtgctttcacatgatacatttttgtcttgcagtccaggttcactgaaatgatattctgggtatgttttcgtgtgttcagaaggctcaaattttaaaaattaaagtttgtctgaaaacagt

SEQ ID NO: 1154 - protein, 670 aa, Mus musculus
MGESNEDIDQMFSTLLGEMDLLTQSLGVDTLPPPDPNPPREEFNYTVGFKDLNESLNALEDQDLDALMADLVADISEAEQRTIQAQKESSQNQDRFALLRASDGQGTASGGYGASAAAIDVSHHEEALPPPPVEPMLDLLPPPPPPPPPELLSKEEEEAKAKADKIKLALEKLKEAKVKKLVVKVHMDDSSTKSLMVDERQLARDVLDNLFEKTHCDCNVDWCLYEIYPELQIERVFEDHENVVEVLSDWTRDTENKVLFLEKEERYAVFKNPQNFYLDNKGKKENKETNEKMNAKNKEYLLEESFCGTSIIVPELEGALYLKEDGKKSWKRRYFLLRASGIYYVPKGKTKTSRDLACFIQFENVNIYYGIQCKMKYKAPTDHCFVLKHPQIQKESQYIKYLCCDDARTLSQWVMGIRIAKYGKTLYDNYQRAVARAGLASRWTNLGTVGTPMPAQPSTVSSGLKTGTSQPNGQMPQAIPSAGPPLQEAQTQIETTKDEKQGLGNHSPGATRENHRPKSSLPPPPPPVRRSSDTCGSPALPSKVKGPGTCTFPHPPENFLPPPPPPPPEEDNSGLLPPPPPPPYLEEPPDFVPPPPPPAAVEDSALPPPPPPPPCLSQEITKSSPLPPKKPLVPPKRQENQGLPGAPGNSEQDFMSDLMKALQKKRGNIP

SEQ ID NO: 1155 - DNA, 144192 bp, Homo sapiens
  misc_feature (1)...(144192): n = A, C, G or T/U
ggccagggaccagtagcaggtaaggaggcaggtagagggaggatcttgttaacaggcaagagaaaatatattcactatatgtgacatatataattagtaaaaatatactaattatatatacctgttatggttaaaatagaaatcatgagcagagttatttttcattgccagtttataatatttaaaaagttaaagcattgaaacttgactgtgacagaaaaaatgagaagcacagatacccaagatggtgtcttgggtgtttactgctgtgaagaaaccaacacttagagcaggggtccccaagccccaggccatggactggtaccagtccgtggcctcttaagaaccaggccacacagtaggaggtgagcagtggataagcaagtgaagcttcatttgtatttacagctgcccctcatcactcgctgtattagtccattttcatgctgccattaagaaatacctgagacgggtaatttataaagaaaaagaggtttaatggactcgcagttccacatggctggggaagcctcacgatcatggcagaagggaaaagaagagcaaaggcacgtctcacacggtggcaggcaagagagcgtctgcaggggagctgccctttataaaaccatcagatctcgtgagacttattcactatcatgagaaaacagcacaggaaagacccacctgcatgattcaattaccttctaccaggtccctcccatgacatgtggggattgtgggagctacaattcaagatgagatttgggtggggacacagccaaaccatatcacttgcattactgcctgagttccacctcctgtcagatcagcagcagcattagattctcatacgagcacaaaccctcttgtgaactgtgcatgtgagggatctaggttgtgagctcctaatgagaatctaatgtctgatgatctgtcactgtctctcatcacccccagatgggaccatctagttgcaggaaaacaagcccagggctcccactgattctacattatggtgagttgtataattatttcattatatattacaatgtaataataataaaaataaaatgcacaatcaatgtaatgcattcgaatcatcctgaaaccatcccccccaccaatctgtggaaaaattgtcttccacgaacccagtccctggtgccatgaacttagtccctgggagaccattgacttagaggcttaagacagccatttatcatcatctttcagggatatgaggctcagcgcagtggttctcccttggtctctcaagcagttgtatttagaggacagctggcgctggaatcatctgaagttttcctgggtctgggcagtgaaaatggtgtcttcacttcacatctgatgcctccatgccccaccatgtggcttcattgccgacacagtagccaggacttcttcatgactgctcaaggacagaagaggcaggatttaagtactatgttcaccatcacttctgttctattctatgtgtcaaagtacattcaagggagagggagagaaatggatcctacctcttaatggggaaggaagatatggccatgactagctttggaaaatacagtctactacagatggcataaaagttagatttttaaaaataagctagatatttaaatcagaaactaatatcccctacaattgagggcaagtcaaataaaataaatagacaaagctttataaaatgctaaactaaagaaaattacctgtgaaaaaaaagaatgacagaaagaaaaagaaaaagctagcaggattctgacttcaagtcaacccgggtccccttacagaaggtgaaagtactttggtcaggaagagattggccagaatacatgttggatttgatgggcttgccaacagagtgaggtagtgagacacagtcaaatccaactcagtgtaaactgagtttctttacagttctataacacacatcttttagccactaaccatcttcttccgaaatacctgaggaattctgcttttattttcttgagacagagtcttgttgtgtcacacaggctggagtgcagtggcacaatctcggctcactgcaatctccgcctccccagctcaagggattctcctgcctcagcctcctgagtagctgggattacaggcatgcgccaccatgcctggctaatttttgtatttttagtagagacggggtttcaccgtgttggcaaggctggtctcaaactcctgacctcaagtgatctggctgtcttggcctcccaaagtgctgggattacagacgtgagccactgcttctgactgaagtctgttttcattggtcactgtccaaagagaatgccacctgggggggttttcccccacaccatcgtctccatgatgggctgttcttctgtgttcatggccccatgggtcattctcttccccacctcccaaactctttcttgccactcctgtatcttgaagctatttctggagtgttctgctaacctcaggctttaactgtgccctgagggcaccatttccactgcagctttctcaaaagaaagtggtttattctcttaaattccagccaccttaagttcggaaggtgagtttatggttctctatgctcctcactgctacttgcaaatcataaatgactaatctttttattaaaaacaaaactaaaagcaagcgaaaaaagctttctcttttgaggctcatgccacttgactaaacaatccagttctgctttctcatttcaaaaccttgacacgtgactccctgtcaccctttaagatgacctgaagtcctgtcatcattctgtttgcctgggacagtcatgaattataactgtttctgtcttttttttttttttagattattgtctctgtctttattttttaaatacttatttatttatttatatgttttattatactttaagtttttttttttagacagggtcttgctctgtcaccttggatgactgcagtggcatgatcacagctcactgcagactcaaacttccaggctcaagccatcctcccacctcagcctcctgagtagctgggactacaggcacacacaccacacccagctaatttcttattttttgtggctgtgttgtccaggctggtctcaaactcctggactcaagcgatcctcctggcttgaactcccaaagtgctgggattacaggtgtgagccactgcacgtggcctacaactgtttcttagcttccgatccacttggcaatttggtactctcaaaagtgtcccggtcttgagacaataaatgatgtggccactccaatcctgagtgacttaaacagttagctgggatgatgcacatagccccttagcctctcatttccttggtcatctcagccactcaggcccacagtcacccctggtctatgtcagcacacattatttcactacctccagaagcaagttcaccctgcctaccttccgaccacaataacccatccttccatctggtttgtttggccactcccatggcggccacactttctccaaacctagccctgcaggagagaggcacaaccgagcagatggcttccactataattcatgatcgccagtttcaaatggaccctcagtctgcctggaaatcccactacatgtttctgatcacctctctctcccattctcttcaatgaccttatcaaactttctccagctccccaaatccatgcctggcctacctcatagttcactctcagcagatgaaccttcttctcacaaggaaaacagaggctttagattagaatttccttatcttacagccatatgaaagaagatccttatctactctaaactcacccttctgcctttccagtaaaatggaggaggtctcttttctcttatctgggagcccattcatttaccttcatttggactcaacccacttcctccatcttgaaaacttttcaccatcaattatttctactctcttgttaatgtcaactcctcactatcatctcaattcttcctgtttgaaaataatgttaaaaagatacataaaaggctgggtacactggggctcaggcctataatcccagcactttgggatgctgaggtgtgaggatctcttgagccctggaattagaggctgcagtgagctatgatcacaccactgcactccagcctgggcaacagagcaagaccctgtctctaaaaataaaataaaataaaataaaataaaataaaataaaataaataaaatcttcctcaatttcatgtctcccaaccactgcctccctgtcccctttctcctctttataggtgatatggtttggctgtgtccccacccaaatctcacattgaattgtaataatctgcacatgtcaagggcagggccaggtggagataactgaataatggcaaccatttctcccatactgttcttgtgatagtgcataagtgtcatgagatctgatggttttataaatgggagttcctctgcacatgctctcttgcttgctgccatgtaagacgtgacttttctcctcattccccttccaccatgattgtgaggcctcccctgccatgctgaactgtgagtcaattaaacttttctttataaattagccagtctccggtatgtctttattagcagtgtgagaacagatcaatacaataggcaaactattcacaagtgttgctttgctcaccatcttcatttcttcacaccctattcacccctcaacccactttggcctccagccccaacatgctattacaattggtttctgaggtcactaacattgctaaagccaattgccactttgcagtcttgtctgacttgtccttgcaacatctctggatatcactgaccacatcctcccacactgtggcttccacagaactttcccctggttttccatccacccctttaaagctcttcctctgtgttctttgtgggctctgtgtcttttgctttggatggtggagttccttaaggcttagcctgaggcctctgtttcatcccacaccatagtctctctacgcaatctcataaatcaccacctatatgatgattactcaaaatgtatatctctaactctgaaccacgcttctctgggcaaaggattcttatatacaattctctacttgaagtctccccttggatgtcctaaagatttgtcaaattcaacttgcaaacaataaaactcactatcttcccctgcccaaatactcctcttccagagttccccatcttgatgatgggatggtcagccatcatcatacaaacctgattctttggagtcatccttgcctcccccgctcttctccctctgcctatatctagtcctctgaatctctggcaaactaccttctaaatatctctcagtttcacccatttcttcgcatttccgctgctgccgacctagtcaaaacaattatacagttgacccttgaacaacatgggtttgaactgcatgggtgcatttatacttggattttcctgctgcttctgccgcccctgagacagcaagatcaacccctcctcttcctcctcctactcaagttgagtaacgtgaagatgaggatgaagacctttatgatgatccacttccacttaataaatagtaaatatgaggtcagtcacagtggttcatgcctgtaatcccagcactttgggaggctggggcaggaagatcgcttgaggccaggaattttagacaagcctgggaaacatagcaagaccccatcttacaaaaaattatttaaaataaaattagctggacatgatggtgcatgcctatagtcccagctgctcaggaggctgaagcagcaggatcccttgagccctggagtttgaggttacaaggagctatgatctcaccactgcactctagtccaggaacagagtgagactctgaaaataaataaaaaataaatacatagaaaatatattttcttttatgattttgttaataacagtttctctagcttactttattgtaaaaatacagtatttaatacatataacataatatgtgttaatcgactgtgttatcagtaagtcttctgggcaacagtagacaattagtagtcaagttttgtgggagtcaaaagttatacatggattttcaactgtgcagcattttggtacccctaaaacctggcattgttctgttacagtaggtagctagtcaggcatgagcagggcaggagagggctcccctcaccccctaccaggaatgtcaggcgactatcaggtggtggtcaggggactgttaaccgtgtctctaaaataataattgatcacagccagcaccagggaaaggcagtctcccaatagatagaaacacctgaaactggtgatcaacagcttccagataagatctcaggagttgggcgagtgggctcaagcatgtgcactaagaggtaaaatggtggagtttaactggcaaatgaccttccagggacatttggtaagggaagaatgcctaaagtgaacacgcgtacaacttcagtaaacacactgcgcatgctcacctcccaagtgctggcacgccactgctcatgtggacagcccactccatgggaagaatcaggaggaggaagacaagaccccgaagtatgtcaatgcgtaaagccccaagtcaaaagtcaaacagcgcacttctctcaagtcacccgcttggccctcttccaagtataatttactttcttttgttactgccctacagttttctaataaactttcgctcctgctctaaagcttgccttagtctcttcttctgccttatgcccctcagttgaattctttcttctgaggaggcaagaatttaggtcgctacagacccatatggttttgccaaagctaacatattttggtgccgtgtctcagatatattctgctgctggcagttcaaaggccaattgtattttctttcccaacttagctcagaagtcttcctgcatctattcttttcttcatctgatccgttccccaaattatgccagagtgattttcctaaagcataaatcccatcatttgccagcttaaaatattatttaatatattctcattgctcttaggatgagaaaataattcttgacatagtccacatgaccctacatggtttgcccctactgaccttacctctaaccagaccttccataactccaatcatactggtttccattcagtttctaatccctctgccactcccttactcccatcccatttcccagcccacccatcagcaaatgctgttggttctactttgctaggtggttgtttgtttgtttgtttgtttaaatagtcttgctctgttgcccaggctggagtacagtggcatcatcatagctcactgcagatttgaactcctgggctcaagcaatcctcctgcctcagtctcccaagcaactggaaccataggcataagccaccatacccagctaatttttttccccatttttgtagagatagggtcttgctatgttgtccaggctagttttgaactcatggcctcaagtgatcctaccaccttggcctcctaaagcactgatattacaggcatgagcaactgcgccaagctttggttttattttgaaaactgtatcttgattccaaactcttctcaccatatctactgttagaatactaataaagctactatcatttttcatctggactctgaccatagtctactgagcaatctctcttctcttgcttcaatcaattgattttctgaacaatcaccaactggcaggatggcttatcgcttaagtcaaatcatgcactcagttgctaaatacattccaatagtcccccattgcaattagaataaaacctaaagtcctcaatgctggctacaaggtcctgcttgttctggttcctgcttacctctctgtccccatccactattgctgccctactctttcagaacattccaggcacactggcctgccttcttttgaactttctatgttcctatctcagcccctcttcttgttcttccttctcttggaatcctttcccaagtttctgaatggctgccccttctcattactttgtaaagaggtgatccttgaccactttccctgccccaagaaagtcactctcactgtttgattttatattttatgtagcacttacaactctgctcagaaccttccactggctttccatctcactcacatcaaattctcttccacagctcccaaatagcacacaatctgggcaccatttccttttgatcccatctcatgtctgtccctcccatctcactctgctcagccgtactaatttccttggtgtttttccaatatcttaagtgctctcctaactcagggtctttgaatgtgctgttccttttgcctggaatattcccatctaaaaacccagtgtggattaatctctcatgccatttagatctagctcaagtgtcacttatcagacagaaataccagtttcaggtgtttctgtctattgggagactgcctttccctggtgctatattaaaaaaaattaggataaataaataataaataaataaatgaaaaatacattttctcttccttatgattttattaataacagtttcttttctctggcttactttattataaaaatacagtatttaatatatataaaataatatgagttaatcgactatgttatcagtaaggctgataacaactgcttgatcatcacctgatggtcacctgacattcctggtagggggtgggaggagccctctcctgccctgctcatgcctgactagctacctactgtaacagaacaatgccagatttcaggagtaccaaactgctgcacaattgaaaatccatgtatgtcttttgactcccccaaaacttaaccacgaatagcctactgttgaccagaagccttactgataatataaacagtcaattaacacatattatgttatatgtatttagataaatactgtatttttacaataaagaaagctagagaaaagaaactgttattaagaaaatcatgaggagaaaatatattttctatttatttatcgtttatttaccctaattaatacagcaaccccatccccatgcccatcactctctatccctcaccttttaacttccttcaaaactagttacattccttgacatgttaaatattaatttgtttattgtctgctttctaccaactagaatgcaccatgcatgagagcagaaattgtttcctctaactattttcattgttcttagaagtgttggtgcttacgaatagtttctcattaaataaatgacagaactatttgaaattgcctaattaacacatgcacctaatttctgtctttatgtcttcaccaccttccctgacatataagcctttgaagacacagctgtagaggagaaggggagggttattcaaccgcatttacaaatcataactgattttaacttctgtattttcagacctccccagcgactttctctcaggaaactccactcccaactgacaggtgctatttccagccagtcctatgctgttgcaaatagtgagtccatgaatgccctctgccgtgtgcattacttattttcatcagcagatcttcgtaacacactcctggaagtgggatgacggggtcaaaaggcgaatccatacataagttaaatagatattgctcaattctcttccacggggttcagaccattttggatttctacgagcaatgaagacagtgctattcctctacaccctggccggccaactgagcgtggttaaacgtggggagggaggagggtgaggttaccaacctgatggttgagaaagggcctccgcccagcgcgcccttcctccacccccacccgagagacagctgaactccggccgggacgcgcgtgttgccagtccagccctgcaccgcgtcccctgagggcgggctgcaggcggccgggaagccttgcacaaccggcccaaaagaggaagcccagaaagtgctgaagtaaacacttagggagaccgttgcaacataaagcggcctctcagtctttggtggaaccatcactaggccccaatcccttagtccctcttgcgtcgaggctgcaaaatggttccattcgccaggagacgctcctgagagaagggcgcgcgcggcacaggtaggggagggataacagaggaaggcgcaacgtttcccagaattaaaataaaataaaataaaataaaaatcccttcaaagtggttgtgtagtaggggtgggatgggggagagaaaatcaggcgcagactcgatgagttggagaaagcagcccctaactcggagtcctttacgcatatgtttgtctgtcccactgtctctaaccaggggccttccttgcacctcggagcaaagcagctcggatagcgccacacgtctgcgcgctgcgtgggaagggcagggctgacagcacttcctccccggggcagcgacctggagcccgggtgcggcagtctgcaccgcgcgtcgctttcccggccggagtctcgccgccttcccgcgccccgcagcgccccgcagagcagtcgaggtaagtggcgctcccagtcccgggagccctgggagcgccagcacgggcccctcggggctgtcaggaacccgtttgtcaagcccgtcgggtccgacgccgggggcagctccaggatctggcctcgtgaacgcgtgcccccaggcgtggccctggagcgcagcgggtccccagggtcccctccgctgatctccactctggacccggctcgcgagggtgggggtgtgagggtttggggttcgggtttgctttttcccgagctattgcaacagatttgacagatttcctgcccaggaaattgctgcaaggtcaaacggggaactgctatgaacccttgcacgtccagcaggtcagcaggtcagcaggtcagcaggtccgggagccccagtctcccggaacctggagggattcttgaggggccaagattagatgtggattaaatgccagccgtgtgagaatttgagtgtggctcgcagtctgatgcatcttagagtgtttccttcctctaaaacttttggacaactctttcctctttttaaaaataactttttcccccgaatattctcattttcattttaaaataccataaagatagatttggacaccaggcacaagtttcataatttggcttgaaatgaatatccagagggccttttacagaatggaggaaactaactagggtgtcctaatgtctccaagaacctctgcgcaggtgttccaccaaagacctagcccggtgtacctcttactttcctgctaaggtatttcttagttcatacccctgtggaacgtgaaatgtgtttcctagagccactcagggcatagcggttcaaaagaacttttaatgtgatccttgacgagacggagtactagaggaaagtaacaaaagaaaagggcccgtgagtttattatgcccccagatgtttttttctggtggcataacgtggtttaaacaaaggtgccggtactagctactattcattttaaaatctgggtctccagagagaaatttcagaaaggaaaactttgtcctttttcataaacctagagcagcgattttccctctggcctcactggaataatgggtggcacatgggccaggacgatgatgctggctggcgaaattagcaaggatctgctgagaaatactttataaagtcttctagtggtatttcctgtctgctcaacgtgtgttgtgaaaggtctaagaaatttaacttcatccttaaactattaataatgtgtgtccttaaactattaatccttaaactattaataattactaatatttgggttttttctcagcacttgggagacctgggttctggctcttatatctcccccatctagataaggatgatattgattaacttgcataacttctccctggacttcagataacgtcagtaaagtgagatgattgggctacattatgtctgttcttaaaatagcaattgaggagttgctataattctttgaattggtcccaactggaatactggcaacattatatcaacattagaattgctgatcacaaattttttaaaaatggagaaaataatcataaccataacagattacattctgaaatatcaatatctttgaggtcttttgtttctgagaagttcctgtaaaagcgcagtcaatatctggcctatatgtaaaaaggcaaatttccatcttatttgaaaactgagataagaaacagcccaaacttgaacaggtcaatattatattttgaaatctttaaattgctatttctcaagaaatataactttgtaatatgaattactttatggcattactttaaatcttaaacacaatacttactaggttttatagtatttattacattttttgtatttttatatcctaagaatgttcaccagttatccactattgatttgccttttttcactcatcaatcaaagttttaaatagttccatattattattagaatgagctacttataaagttcattgccataaatgtctgtttgatatgtcactttgaattttctttaagccatcttacttccaaagagcattattattttcattttcttctaattctcttcaattttattttaattatttttatgcctaaaacattttagtgagtccacaaatcttataataaattgtctgcgttccatagcctattggaccacaatctttacaattttataggaccccatgagtttatattatggagactacggtgatcttaggaatgcttgcctcaaaacagaacaatttttattaacacaacaggtatcttctcagtatgaaaatgaatgtgtgtgttttatgtcactgctgtcatctaagaggcaagtcacttaaagcttaagcatttattataaattcatgtacataataaatgccagattttaaagtgtaagatttctacactggttgcatggggattttaaaatacatattacacttttaattatcgtgagaaacatgacttttagagaaaactgctagatatctggaacagtaatcattagatttctcttgaaaagagagaactagccgcatgaaggaatgccattacacctatacccagttaaagagactagattgtacctgcagcttggaagggcagaccctgaggacagcttttgggggactagaggatgtgacctgccaccactgcatcatcatttcctagccaatttgtgatcccaaaatgaggactccaaagaggctggctaaatgtgcagaatatattaatctcactgagtggtaccatggaaatatcacaagcccctgagatcccgttggctccactggtcccaaacctcaggcatgagcaagcagagaggtgacaccactccaaggcatcacacgttctcattattccacatattctggagcttgattccgtgactcagttttaaaacatttcctgagcgttgaccatgaacttgaataattaagaatcataagagctattttctttcttctctgtcaactcagttttctctttgatcatcacatagtaatagcaaataataattattataatgtttacttataaatactaccaggccctgtactaatttagatgtgtcatcttgttaatcatcacatcaagatgaaagcacagagagggtaagaaacttacgcaggaagtaagaaacagagctgttgtttgaactgggccatctgatggtggcacccatgaaaaaacctggggcctttccacaatgagtttatagtctagaagaggagatgtaactagatgtaagaggagatgtagaattccatgcggaaccagagttgagtgctgtgggactacatatcagggtccctggtctccccaaccagggtcacgggagaaggttgaatagaaggaaaccaagcaaagaacttatcgtgttatcatgggaagacaagttaatataatcaactttgaagttattatctttacgtgtgccttgaaaaaagaatctgctttgttagcaatcgtgtgttttcatttttgtgtttattttattctaatcccacatgacagctggctaggttgattaaatcaacaagcaagcagtgagtttaatattttttctaattctgttggggatctttttgatttagtttcatgttacagactcatcagtgagatggttgtgggctgggatgggggataaaagctaaatcacacagcaactgtgtttccccaaaccgactggagggtttgcatccagagagctacatcacatcaaactggagagaaacaaaaaatgatattagagcaagtgaatcatgactagattcatttcttccttcatgttttattatgaaatgtttcatatctacaaaagatgatgtatatatgtaaataacaacaaataataataaagccaacatctgggtacctatcacccagcttaagaagtagaatatttaccaagacatttcctggtctccttccaataacatttccccatttcccagctagaggtaatcattattctgaatgtgctaatttttaaaaagcttttaggaagcatgtacatacatttgtaaaggatggtgtcaaactggggatcaaagaacactggcatggcagactggagtcaggttctccaccgactctgggtggtcacaagcagcttgtgctgttcagtaaagacagcttactttaattgaatagcataaaaacaacatgtattagaaatagttaatagtaagtaccacggaaattgtgctatcttagacattgataaagtgaccaagaatcatcagtaaagaactatgagttttaagtggaataaagaatatgtggccgggcgtggtggctcacactggtaaccccagcactttgggaggctgaggcaggaggatcacttgaggtcaggagttcaagaccagcctgaccaacatggtgaaacactgtctttactaaaaatacaaaaaaattagcctggcatggtggtgcatgcctgtaatcccagccactcgggaggctgaggcaggagaatcgcttgaacccgggaggtggaggttgcagtgagccaaaatcatgccattgcactccagcttgggcaactctatctcaaaaaaaaaagtttcaagagcgaaactccatctcaaaaaaaaaaaattacttatatgaggaaaataaataaaggaggcaaaagaaaaaaagaatatgtaacttaggaagtcatctccactttatttatttattcattcattcattcatttttgagacagggtgcaggctggagtgcagcagcacaattaaggctcactgtagcctcaacctcctgggctcaagcaatcctcctgcctcagcctctcatgtagctgggatcacaggtgtgcgtcaccatgcccagctaattaaaaaaaaaattttgtagagacagggtctcattttgttgcccaggctggtctcgacctcctgggctcaagtgatccttccacctcgggctctcaaagtcttgggatcacagacatgagccactgtgcccggccagatctccagtttaaatacaattcaatcattttcagtcaaaaatgtttgctaagcactattatagacgcaaggaatgtcagtgaacaaaagagacaaagatccctgcatttgtggagtttattctggtggacagatacagatgctactcaataagcataataaataagtaaataatataggtattagtaagcgaaaagcaaggtgaagttgcaatatgcgataaggtggtcaggctgggccctttcgtttgcaggagacaatggagttaaccaagtggctatctgggggaacagtgttccaagcacagggaacagtcgaggctgtagggcaggggcatgtctgtggatttgagaagcaacaagaaggcccctgtagttagaggtaaatgagcaagggagagagaaacagatgtggttggagaagtatgagaagggcgaggagatagcagatcacgtggggttccagaggccattataaaactttgactttcacaccgagcaaaatggaggggccattgcaggattctgagaaggcgaataacatgatctgacttaaggctcactctgactgcttgagaataaacctgggggagcagaggtgaaagcaaggaacccatgacaaagcgttggattctgcgtatattttgaaggagagccaagatttcccgacagaaggaatgtggggtgtttgagaaagaggagtcaaggatgacttcaaagtctgtggcctaaacaactggaaggatgaaattgtcatcaactaaagtcggcaagttggaggggagatgattagaagttcaattttggatgtagatatgaagtatcgtttgggaatactgatgtgcttattatatataaggctaaaagcagggtaaccatttgggaagatactgttattgctcctattttgcaaattagaaatgacaggtaagggagtttaggaaatttgcccaaggctacacagtttaagaaatgggacataggctgcgtggtggctcacgcctgtaatcccaaacactttgggaggctgagatgggtggatcatgaggtcaagagatcaagaccatcctggccaacatggtgaaaccctgtctctgctaaaaatacaaaaattagctgggcatggtggtgcacgcctgtagtcccagctattcgggaggctgaggcaggagaatcgcttgaacccaggaggcggagatttcagtgagccaagatcatgccactgcactccagcctggtgacagagtgagattctgtcaaaaaaaaaaaagaggaaaagaaagaaagaaagaaaaagaaagaaagaaagaaagaaagaaagaaagaaagaaagaaagaaagaaagaaagaaaaggggacataaaacaaagtctttgcaatcctaaaacctttaattaaactttcaaaactttgagaaggagttgatccaaaatctttattaggtagctaaaataagaatatagttagctaatcagcaattttctacctccacaataatcaaaacaatggaaattatttttgagaagtggaaagcaagaaatgaatacttaaaaaccccatccataaattcttttttaaattgttcttaatagagatagggtcttgctgtgttgcccaggctggtctcaaactcctgggctcaagtgatcctcccgcttcggcctcctaaagggctgggctgggattacaggcataggctactatgcctggccatgtaaattcttaacccatgatgtagactttatgcaatacaaggcttccaagactgtgcagtttaaaaacaagattctgcggaagttaggacagagacctttcccacaaagaagttttttgtgcccggaggtttaaaatgtttagaatttcaaaatccaaaccagatttggaagataggaatgtttgccccttacacaactggatttcaaatggattcaagtgttatagcagggctaaaaattctctagaagctgttgaagaatgctggacaacactgttaagatatttggagagctgaaagtggttaagaagtaattactaacagtgatcgagataactgacatttcatttgtcttagttattaactgctatcaagccagggtaataacgacatagtaatattcagtagaatgctgctaaaaggtattcattaccacctagtagaactgtgttttccacggggcagaagttcagtctttcaagtgtgtttgtaggatttcacctcagaaagaaaagaacaaattagttatgtggggcagaagcggggaatcccacaaaatctttttcaggtgatttcacatcatattatagtgtattatcacaattaggttactgattaagtaaatttacctatggccactgtttttatagcattaacaaattcatgcatctctgttgatcacataacattcacaggtgacagttagggcaatgaactcattaggttttggatacagtattgttttccttttaagataatggcttccttctgattaaatttcataaacggtatggcttagcaaaccaagactatttcttcatgtgtttactcattctgtggcattatatttcccctgttgtaagcaacacacagaaatgaagctgcttgggccatgaatgtcggtaagtgctatgcagtgtggtgaaaagatggccggccgtgagaccactgcagaatgcccaagctaaaatgaacagtactcactgttcctcaaggctgggtttacagattgggctacagtactgaaacacacacttcagctgaatcagactctgctcaatgtaatataattggaactttttttccagtttcaccacacgtctattgatggccaaccccatgccagtgtagggggcacgtgtagctaaaataggataagatatggtcccctgcccagcatggtgggtcacacctatagtcccagctacgtgggaggctgagataggaggactgcttgaggctgcagtgaactatgatcacgccactgcactccagcttgggtgacagagcaaaacctgtagatagatagatagatagagagagagatagatagaaatagatagatatggtccctaccctcaagaagcttccagtctagtgggaaagacaggcatgtaaaaaaaatacattacagtgcagaatgtgcaatgtttgatacagaaataatatggtgcagataatgattataggacagatattatggggggatgatcaagaggtgctttgaaggagaaaggtatagaaatgcctttctaggaggggtgtggtggctcatgcctgtaatcccagcactttgggaggctgaggagggcagatcacgaggtcaggagatcgagaccatcctggctaatacagtgaaaccccatctctactaaaaaagtacaaaaaattagccaggcatggtggtgggtgcctgtagtcccagctactcgggaggctgaggcaggagagtggcatgaacccaggaagcggagtttgcagtgagccgagatcgcgccactgcactccagcctgggtgacagagtgagactccgtctcaaaaaaaaaaaaaaaaaaaaaagaaatgcctttctataccttgtggccaaatggaagaaagatacgccaggcaccagatgtgtaaaacactttagcagtgctgaagcataaaatgcagtgggaaaggaaatggggagaatctaatgtaacatagaatgagtaatattcagattacattaatgtgatgtggtccctgcaacccaacatatttgagtcaaatactgaggcgcttgcaataacagaactgtagcactctggagcagagctgtccagtagaactacaaagcaaattacatgtttaactttaaatttccttggtgccacattagaaacagtaaaaagaaccatgacttttcttttttttgagggagggcctcactctgtcacccaagcaagagtgcagtggcatgatcacagccactcccatcccatttttttatttttttgagaaacgaggcactatgttgccctggctggtcttgaactcttgggctcaagcaatccttccacctcggcctcccaaagtgccgggattataggtgtaagccactgtgcccaactgtgatgttaattttaatcacttattttattaaatgatatatccaaaaatgataatagcactctggatcaaatgattatttttggatatttcatttaataaaataaactattaaaatgtgaattgtttgaagttatattaaatttaatgtttgaaattatatttaacagtaaaaatcaagtgacataaatttttactaaaaattttaaaaataatatattacttaattttgatataattgaaattatgttacatttaagtaatagtaagattatttcattttttttaatttttgtagagatgagggtctcaccatgttgcccaggctggtctcaaatttctggcctcaagtgatcttcccacttcagcctcccaaagcactgggattataggcatcctgccagtaatagtaaaattattaatgagctattttattccattttttaatactaagtcttgcaaatccagtgtgttttcacacttactgcacatctcatttcagactagccacagttaaagtgctaaatggcctcatgtggctagtggctgaattgggcagtgcagattgagataaattcacaaatattgcatcctatactatgtgttgactatgcaactgaaaggaggatattaggtgaattctaaagtattcagaattttttagggtaaaggaagtaaacagcatttgcaattactttggggcctgtccctacaatctgattttaattcatctttaaacctacacccagaatgcattatttgccctctagtaacaaaacaacctcagatagtcatttgcttgctttcctttttatcctctttctcccccaactccccaccaccttatatattatggattctgcctaaaagtaagaaggactgaaaaagaactggaaacaaatggcgaagcaggatgccctcaacccacatccggcaaaatgtgatctgttgccctaggcaaccatggtggtcaactcttctgttttcttttttttgcttccacctgctagttcacaagcataacactctcatcgacagccactctctttgtggcggttctcagctccaaaaatacgcctgtctttcaggggagggcagtagtgctaagatttggaaaatgggttggagatgcgtaggatatgactcaaaaaagactcaaggagattccagtgcagttctttccttgttaagaatggttacggatccctgttctagaaactatacttacagatgtccttccagtggcttagtcttttaaaagcgtgcctgacctacaaagaaaaatggcagtttaactcagtctccaggtgcatgaagatgcaacagacagaagtaaccatccccttgtggacttgggtgtgtgtttatgtttgtgtgtgtatatctgtgtgtgtgtgaaagagagagagaataaatgactgacactttttttttccactgctggttttagagggaaaacacaataataaaaatgatgatgatgatgaggatgatagaaataatagctgatattaagcacttcgtatgcaccaggcattataatgagtacattacaagcactaactacctcatccctatgaagcaggaactgttgttttgttttgtgtgtgtgtctgtgtgagcctttagtttctttctaaattccagttgaatagaagtattggcatttgtttcaaggggatatcatcttgattgactaaaagtgttccaggtatcaaatcattactgccaatgtgattccatattctccaatatagttgtcaaattttctcatcagaacccactcaaaggtgcttgaagtccaggcactgtggtttatgcctgtaaacgcaactctttgggaggctgaggcaggaggatcccttgatcccatgagttggagaccagcttgggcaatacaatgagaccctgtctctacaaaaaaatgaaaaagccagacatggtggcattctcctgtggtctcagctacttgggaggctgaagcaggaggattaattgagcccaggaagtcgagctgcagagagccatgatcgtgccactatactccaacctgggtgacagagcaagaccctgtcttaaaaaaaaaagtgcttgagtatcagcaacatcctgtcagaaatggtagtatggaaagtaaaattatggagaatggtttacagcatctcagagaagggtataagagggcaaagggggttgtgttaaacgctgggcagttttgcagtggatcaaacacgggcattggaattggcattatatttattggaaggcttataaatactcagccattaaatgcgtctgtacatgcaaagcacttagaataatgcctggcatgtagcatgcgctcaaaaatcaaatatcttgtttcaaacatttagaacaaaacaaaattaaatcccccctagaagttaccattgaaaacaactcaagtattatctccttgtattttgacattttgaaaagaactcaagtattatctccttgtattttgacatttgaaataagcctttgttatccacatgcctctaagggcatgaaacattgtagattaaacacaatttcacagccactgtgttttagtcaaatagtccataggtagatgataagagtatacactaatatttttattcttttctttattcttctccttctctttgttaagcagttttggacaattactctttgtggaacactccactatggctgtggaaaactagtaaatgtaaagttgttccctgacccctgccctcctggaactcagattcttttttttttttttttttgacactgagtactgagtctcactttgtctcccaggctggagtacaatggctcaatctaagctcactgcaacctctgcctcctgggttcaagcgattctcatgcctcagcctcccaagtagctgggactacaggcatgtgccaccacagctggttaatttttgtatttttagtagagacaaggtatcactatattggtcaggctggtctcgaactcctgacctcaggagatccacccgcctcgtcctcccaaagtgttgggattataggcgtgagccaccgtgcctggcctagaactcagattctgtttcaagcaatgagatgcaggtgtgtgaaaagtgttaactgttatagattggcaaaatacacaggacgttgagagacagtaattaattctaaggaaagagcaattataagaaatgaaaggggtgttttatttatttaaaataaaataaagattatttaaatctttatcatatgaaattaaggtgacatggaagacatgaaggaaagaaaccaggttgggagtcacattagagttgccttcgttttactttagtttttgatagaggtgggttctcactatgttgcccaggctggtctcaaattcctgggctcgggtaatcctctcgcctcagcttcccgaagtactgagattacaggcctgagccactgcgcccagcctagcgttgcttcctaattaagaatgtattaatagtggattgaagcatttctctcagtcctcaggaggaactctgtgctttacttaagatctgaggtaactcagaggcaccttggattttgtaaatgatgcgttctgcttttgccatttggacgtccagaatcacatctgtggccaaattcagccactattgagatcctattctatttttcttctcttatcttgtatctgtaaattaccttaaaccctttttcaggagatgtggaataaataactaataaacactataagaaagtcatttatcttccctgcctctaagttttctcaattataaaatgaaatgcttggattaagttaaactgagcttactttcctagttccaatgttttaagattatatgcatgaagacaggattgtccaggaatgaaggcaatcttcagtcaatcctcaaaatcagtagacatggagacttcctatataagagtagaaataacaatcacttggcttaaaacctttgaatgaagtcaggatattagatatcaattatcaacacttcctttcaaaacaaggcatttatctggttttaaggatggttagaacatgtaaatgtacaaataaataaaagccctttgtgctgtatatggtggcatagatgaagacttatgagacatcaaatttaccaatgatccatttcaatgacagacattttttaaataatcagcaatttttaaggttttgttgattatatcaaacatattcttagacaaaaaaaaaagtgtgtttattcctttcctaaaaacaaataaaaccttaaaaaggtgttccagtcttgcactattatctaaggtaggaattatttttgttgtacagacgaggaaactaagctgagagaaagtctaaatgacttgcccaaggtcatccagcagctaagtatatttacaagtacatggtgcatgtcacacacttgaatgaaaatacaagatgccatgcctgaactcactgtgtgatgtgaaagacgggcatgcacattatattagatgtggacatggagacaccatcacaaacatattaccaaggaagccaccaatttccacctcttaataatcacaattcatgttttcagaagacaatgtagttatctaactatctaatttctctaggcctgatttttgtaacctataaaattggaatcatgtcactatctcatagaattgttttgagaattaaatgagatactgtaggtgtctgacctgtagtagttgctccatatttatagctcctactattctttttttaatttttatatatttagggggtacaagtgtagatttcttacatgcatatatttcatcctggtgcagtctggactttcagtgaacaggtcacctaaatagtgaacattgtacccaatcggtaatttttcaaccctccatattttgtagcctccaatgtctatttttccactctgtatagccatgtatactcattgtttagcttccacttataagtgagaacatgcagtatttgaatttctgtttctgagtataactcctactattctttttaattaagatatactatcttcatttaaatattttacattattcttattatgcattaatactagctagcatatatttcattttaagtgccagtggtggtgctgtgccagtactaagagagttgaggtataaatattgctcctgtaatgtggctgaagagattaaaaaatgtctataaagagataaacaagtcataaagcaggtcatgaactgtcaaagtcgtgattctgatgctgccagaatggagctgtaggtcttgagttggctttgtgtagtgggtaggacttatctgagtggagaaatggcacagaggtaatggcaatggtgtgtttagaggaggagaaaaactcctttcactgtaaggcaaggtttaatgagaagaagatggagatgaaattggagtggtgtgctgggcatggactgtggatgagcccatcctatgagatatttgctctgagctgggagacatgaggacagcctgcatacacagtgacagtgagggtgggacagggctttcctgccaggtccctgctcctcgactagaagcactggccttcctcctccatccactcattcatctcctgcttgcctttctctgatgacgtggacttgccagatttggtgtttgtcccctctggacctagaattctcagatatcctactgacctggccatggagaccactagtgttcctctgggctatagcacagactctagccctcctgaaaaaggcctcaagggacagttgcccctggcagatactggccgataagcacagaaaaaaaatgctcaacatcactagtcataaaggaaataccaatcaataccacaatgagtacaaccactatggagaacaatttgagatttccttgaaaaacgataaatagatctaccatatgatctagcaatcccactgctgggtgtatacccaaaaggaaggaaatcagtatatcaaaaagatatctgcacttctgtgtttgttgcagcactgttcacaagatttggaaacaacccaaattccatcaacaggtgaatgggtaaagaaaatatggtacctatccacaatggagtactattcagccatgaaaaagaatgttatcttgtcatttgccacatggatggaactggaggtcattataagtaaaaaaatccaggcacagaatgacaaacatggcatgttctcacttatttatgggatctaaaaatagaaacaggcccagtgcagtggctcacgcctgtaataccagcactttgggaggctgaggcaggtgaatcacttgaggtcaggaattcaagaccagcctggccaacatgacaaaagcccatgtctactaaaaatatgaaaattagccgggcgtggtggtggatgcctgtagtcccagctacttgggaggctgaggcaggagaattgcttgaacccaggaggcagaggttgcaggattgcaggactttattctggctgctcaggaatctgatgggacaaggagctgagatcgtgccactgcactccagcctggacgacagagtgagactctgtctcgaaaaaaataaataaataaaaaataaaaataaaaacaattgaactcatggaggtagagagtagaaggatggttaccgaggctgggaatggtagctggggtgggggagatgtggggtagttaatgggtccaaaaaaaccagaaagaatgaataagacctagtatttgctagcacaacagcatgactatagtcaataataatttaattgtacattttaaaataactcaaagaatataattggattgtttgtaacacataggataaatgctggaggggacggatacctcattctccatgatgcaattatgcattgcacgcctgtatcccgtacatatatacacctatgtacccaccaaaattaaaaattaaaaacagagtgagataccacctcacatccattagcatggctataatccaaaagagagacaataacaggtattgatgaggatgtggagaaattgggagggctttgaatggctctccacagtttgacaacacatgatgaagcaatgagggaacaatttcatttttgatggctgtctctgctcagaggctgtctctgctgcaggactctattctggctgttcaggaaatggatgagacaggatgctgaatggagttgggtagttctgattttttgccaagaggcaaatgagagggatgccaggaaaaacagtatatgatattgctcggctaatttaaatataaatatgggccatggagtaaagtactgtgagtgtatcattaagaaggaaaaagtcaggcctgggcacagtggctcacgcctgtaatcccagcactttgggaggccgaggcgggcggatcacaaggtcaggagtttgagaccagcctggccaacatggtgaagccctgtctctactaaaatacaaaaaagttagccaggtgtggtgcgggcgcttgtaatcccagctacttgggaggctgaggcaggagaattgcttgaacccaggaggcagaggtagcagtgagttgagattgcatcactgcactccagcctgggtgacagaacaaaaaaaaaaaagaataataataataagaagaaaaacgtctttggggatgctcacgttaacttagtaaagttacgtggttactgttatgtgaaacacatataaaatacatacacttcccgaagttgaattttacactatgtctgctgattcagctgtttagagttttgggggatttctttttttttggtttgtggttccaaggccacagctttggaaaacagtgtgtcaattcttcaaaagttaaatacttacagagttaccatatgccccagcagttgcactcttaggagtgccaagagaaatcgaaacatacatccacacaaaaatgtgcaggcaagtgttcataccggcataatttgtattagctgaaaaaatggaaacaacccaaatgtccatcaactaataaaaagaaatgaagtgtcagcacatattacattttggattgaactttgaacacattaagtgaaagaagccagacacaaaagaccacattaatgtatcatcccattgataggaaatgtccagaataggcagctttatatagagaggaagtagaataatgattgctaagggatggggagaggaggagtgaacggatacagggtttcttttataggagaagaaaatgttctaaaattagattgtggtgatggttgcacaaccctgtgaatatgccagaaccattgaattatacactttaaataggtggattgtttcatttcacctgcatgcaaggagctgctctatccacgggaaaatggatgcactaggtgcaatttgcactctgggttcagtacattaagtgaaagcctttggtatgcctaggaattatagggaaaatagcagtgatagcagcggagtagattttaggagagaacaggatggatgtctgaaagatgaggttggaggggttgatgcgggttggactatggaaaaatttaaaagccaccttatggagtttatattaaatcctatggacagtagagagccactgaaaagttttgctacttgaaagaatatgacagaactgggttttaagaagaaaactctggtggcattatagaagctgatttaagaagcagagactgtggcgagcatctgtattcccagctactcaggaggctgaggtgggaggatggcttttgtccaggaggttgagactgcgatgagccgtgatcatgccaccgcactccagcctgggtgacagagcaagaacctgtctaaaaaaaaaaaaaaaaaaaaaggagagactgtttgagcctgtgtaggcatatgaaaaataattacaaaagaaaagaaggagagattggagataggaagatgaaaagtaagctgggggcagaatcctgataagatgtggaagacctgtactaggatggtagctggggaaagtgtgggacaagttcaagggcattagaaaggctaaactgaccagacaaactgatcatatttgggacttccagaataggtgatgcttctgagaagattggcttagtgaaggttattgggctataggtcaagataaatgtaggctggttttttgggtgtttgtttctttagcaagagagggatactatctgaaaagaggagtccttgtgtccaagtggctccttttagacactcacagcacaggagctaggctgtgcttggtcattgcagatgttcatagccatcaagtcagcccacctgtgtttcttctccgagccttgtcttccctttctctggtctgctttttcaaattctaatgtacgcttctttttcagttccccaatttctggtaactatcgcatttgaatttttcttttttaagagacagggtctaactctgctgccaggctggtcttgaactcttggcctcaagcaatcctcctgcctccgccttccaaagtgccaggattacaggtatcagccactgtgcctggcctcacctttgattttggtatcctttacccagacatccagtcgcagcctcacttcactgcactgttcaactcctaactcagtatctgattttcatccagggcttctctgtgctgactttgtccccagttcccaagataacatctggcttagatctccctataccaaaacctatactggtaagccaggggacctgggaacaggctgaagaggaggctggaagggggccatgttgcatttaaaccaccagtagggctgcctggtggaaatgctctctatgcaatgcaaagtataattgcagggcttaaaaatgaggagagagaggaagacacagataagtatgagttttctgcttccctctgaagcaatatctatagagattagataacaggaataagtataataccaaacaaagatcagggaagatttatcctaaagataatctggatcatagctacaatgactaaattatttgctctgaaagggtaaacttgttaccaccattccttcagaaaacacttaaagctgggtctttattggtatttatgaaatctggatatttttatggcctgactaatacctttgtcaagcccttggacagcagagaagttgtatggagccgaaagtgcaaggacttaatgaatgatttcttgaaagtattactgaaactctctggatgtggtgtctcatgcctgtaatctccgcactttgggaggccaaggtcggtggatcacttgaggtcaggagtttgagactagctggaccaacacggtgaaaccgcgtctctattgaaaatataaaaattagctgagcgaggtggcatgcacccttagtcccagctacttggaaggctgaggtgggaaagtcgcttgaacctaggaggcggaggttgcagtgagccaagatcttgccgttgcactccagcctgggtgaccaagcaagactctgtcgaaaggaaggaaggaaggtaggaaaagggaaggaaggaaggaagggagggagggatggagggagggagagagggattactgaaagtttttctggaaagatccatgaacacctgaccaaaaaattaacaaagctaattttccagtatcacttttttctctcagtgtctacatcataacaaacctaagttgtatcttaatacattatttgccttttatatcagagcatcactggaccattgtaaggcagtagtaataagttattaatgataaaataggtaacaaacaaagactataatatgctatcatcaaaaaattaaggccatatttcacttcatgttttagattctggtaggattttaaagcaccaaattctttgatatttttgaatatactttcactaattctattattatctactttattcttatttactgttctgttttaattattgtctgctttcattacttttttctccaaaatttcctctgaatttgactttaattaaattgtgtataagtgtgtattttctttactgtggttattttcttttcttttcttttattattattatactttgagttttagggtacatgtgcacaatgtgcaggttagttacatatatatacatgtgccatgctggtgtgctgcacccattaacttgtcatttagcattaggtatatctcctaatgctatccctcccccctccccccaccccacaacagtccccagagtgtgatgttccccttcctgtgtccatgtgttctcattgttcaattcccacctatgagtgagaacatgcggtgtttggttttttgtccttgtgacagtttactgagaatgatgatttccaatttcatccatgtccctacaaaggacatgaactcatcaatttttatggctgcatagtattccatggtgtatatgtgccacattttcttaatccagtctctcattgttggacatttgggttggttccaagttttgctattgtgaatagtgccgcaataaacatacgtgtcatgtgtctttatagcagcatgatttatagtcctttgggtatatacccagtaatgggatggctgggtcaaatggtatttctagttctagatccctgaggaatcaccacactatcttccacaatgattgaactagtttacagtcccaccaacagtgtaaaagtgttcctatttctccacatcctctccagcacctgttgtttcccgacttttttattttctaggtagtttgatattgtccttttgaaattttcttctctgtttcctcagctgttaaggaaaatgttttctacttaaggagttttttttaaaatttgttttagcccttatttttcattttcattattgttgtatcttggtcagagaatgtggctatttctcctttgagaaatttatttacattttctggcacataactagttttcaacaaataatttataagctaagcctaatttttactcaaatcccctataatatatttatgtctttcccctattaatcagtcaaatatagaaattaaatttattaccattgctaaggtcataattttgtaagccaaatttttactattattttctatttacttagtcttaaaaataatttgtataaacaaaataatgtatttttgcttggaaaatttaatgatgactcagttctgaaccaagacaaataatgctaaattcttaattacagttcttgcctccagagaaataaagaaaataattagctgatgacaagaataacactctctgtaaagttactgagcacagtaacaaataaataaacaaataaaacacccttcttaggaataattatcataaaatttgctagtcagaaacaatacatgaaggatacactgtagtttgcatcttcttttccctaagaatttttagagtcatttagaattttagaatgtagtcaagaaagacaaagaatttgttgcaatgcacttgtccatctcaaattgtcctcctcacattgactccccagcaatgtttaggagaataaagccacaataggatggagtggagaaatctctttccccttttttatgagctgccctcacagtaggatgttatatttttgcatgcatatgttcattgttcacaatagcactattcacaatagcaaagacatggaatcagcccaaatgcccatcaatgatagactgaataaagaaaatatggtaaatatacaccatggaatactatgcagccataaaagggaatgagatcatgtcctttgcagggacatggatggagctggaagccattatcctcagcaaactaatgcaggaacggaaaactacacactgcatgttctcacttataagtgggagctgaatgatgagaacacatggacacattgggggaacaacacacacctgtcagagggttggatggggagcggggagagcatcaggaagaatagctaatggatgctggggtaaaagctcactgctgccagcactcactcctcagtctaagatggtagggacaaaactgcccccagaagattgtggttttccacattggctttcacttcatgttgctaatttccacctcctaggtctcatgtcaatgtgtctgcttgactaatcacaggtagaatcctaactgcaagggagcctgggaaacatcatttctagatttccagcttctatattataggaacacatcataaaaggcacttggagagggcgttcagagagccagtcaaaagtatctaccacaaaagtattataaaacgaaggaagagagggaaagaaagaaggaaagaaggaaggaagggaaggagggagggaaggaaggaaggaaaaactttttttcttatatgacttataattttgcttttatgcatagattcataattcaacaagaatttcttttgcatatggcaatgaggatagggatctgactttatttcttccaaatatatagccgattatttcaatacgactcattaaatactctgttatttttctactgattactaactgctaactttttcatacatcaaatttaaattctgaaatctttgtctttttccgttggtttatttatgtaaatcctgaagtgccaaatatgtttatttttctttaaaatacatttttattacttaggaataatcttttttttttaggaataagcttttattctcagataaagttgagagtcaacttgctgactttcttttcttttttataaatccatttggggatctaattgaagttgcaaaaagtttcatattcttttaggaagagttaccattttaatatggtaaagatgtctctccctacattaattcccgtaacatggtagttcccttcattttttcgtcttcttttatccatatagttttattattttttctatcttgaattgacaaattgcttattatttatctctatgtttttcgtagtttttgttgctgttgtaaatctgatcttttgccatgtcattttctaatatttattggtgtatatataggaacactactgatgtgtatatatttacttcacatcagccaccttattaattctactattcacactacaattctcttgaattgtttatgtagacaattgtatcacctccatattttgctaactttgtcttttctccaggatctgcaggccaaatccacgtggctgcttctgtagataatgttttattggcactagccatgcttgtttgtttacgtagtgtctacaacagcagacttgtgtggttctgacaaagaccatctgacttgcaaaacctgaagtatttgctgtcttgtcccttataaaaaaaagtttcccaagtcctgccattgactgtttataaatttaagatctttttctggacctcttattgttaaggacaaccaaaacaaaactaaatagtagcaataatggcgggacccctttgacttgtgttttacattggaacatttttggtgttttacagttagaatgatggttgccattggtttctggtagataacctctatcaagttaaggaaaacactaaccatttcaaccttactaagagatttttatcaggagtgggtattggattttaggaacttcctactcaccatgcattgagatgatcatatagtatctcatttaatattttaacttagtgaattattctgatacatttcccactggtgagttgttcttgtattcttggttattatgtactatccttttaatgtatttatgggatcaatttttgaaaattttgtttgggattttttcatctatatttgtaagtaatagtgatttgttgttttcctattttaggaatgctttttttagtggcaactcattcttgttgctgtcatcttaaatctctctgaagacagcaattggaatttcttaaaagcctctcttctatttctttcatccactcaatttcctctggggtcaatatcttggtttttaatctcgatgcttcatgctcttgttactcctcaaatgtttgatgaccccgattgtcgactcataattttaatgaaagggttagaatgacatagaaggtggtatggatttacttgggaactagagcaagcctccttctggactgagaggctgactgtggcattctgtagatgaacatgggcatttatagacagatctaccctttgggttggatgaagatcagacagtaaacttcagccatcgttgagcgttatttgccgaagccagcaaaaatatgtactgaaaatggagcacccaagagtgcttagtaaaattcactggaaggccaggcgtggtggctcacacctgaaatctcagccttttgagaggcagaggtgggagaatcatttggtgctaggagttcaagactagcctgggcaagatagtgagatcccatctttaccaaaaaattcaaaaaattagctggggatagtgtcacacacttgtagtcctagctactcaggaggctaaggcgagagaattacttgaacccaggagtttgaagctgtagtgagctatgactgtgccactgtactccagcctgagtgacagagtgggaccccatgtctaaaatttttttaaaaatgtaaaacttcactggaatgtggaaatttcttttcccactcccttctgattgattgattggatgcttggctggttggatgggaatctgcctgactgttatggtgtcccaagctttctgggcactgctctacttgttttttggctcaagacccacctttggaatcaatgaggtattttttccacgttatttaaggcaagggttcttgctgattgtagactgggggtgattatggcagcccattgttgacagggaagtcaaatggcccatagcatttttaaaaaatgtttactttaaggtctgggatacatgtgcagaatgtgcaggtttgttacatatgtatgcatgtgccatggtggtttgctgcacctatcaacccatcatctaggttttaagccccacatgcattaggtatttgtcctaatgttccccgccacttgcccccaaccccggacaggccctggtgtgtgatattcccttccctgtgtctatgtgttctcattattcaactcccacttatgagtgagaacaggaccataacattttaaatagtgattcctctggttggttgtccctggattcccatccttgctgacctggagcttgggtgtctgtcttggctctgtcttcagcagccctcctctagatccatactggactccacattttttgctttagttactcagtatctacagtcccttctctgtagcatcttccagaagtttctcaacattttgatctactcataccatccttccatgctttccagactgttataaagtcatttcattggaattttaggagacagtatatagtcacccccactatttggaactagttttcagtacattttaaatgtattaatacccacctatatgcaaacaccgctatgtaccagttgctgtgcccaggcctgactgtgctcatttagtcctcgtgacaaatttattttattttattttttgagacaaggtcccactctgttacccaggctggagtgcagtggcacaatcatggtccattgcagcctcagattcccaggctcaagtgatcctcccacctcaacctgctaagtagctgggaccacaggaacacgataccatgcccaactaattattattacttgtatgtgtgtgtggagacaggttcttgttgtgttgcccaggctggtctcaaactcctggcctcaagagatcctcccaccttaggttcccaaagttctgggattacaggcgtgagccaccatgcccagaccataataattttatgaattttcccagccctgttttacagatgaaaaaactgaggctgaaccaagttaagtaagttactcaacatcatgcagtagttagcattgaacctgagtttgactcattcagttaccacattcacacctaataagttttctgatgatacagcagggccccaacaggtaccatctgaaggacaaacagggataaatccaagttccttattctctgtttttattttattgatatatgaattaaatagagaattcacttttgtggtctaagcaaaaccaacagagaactctggggcattctctgtttgcaaagacattatttccattttagacatgtgctttctcgcacagctgtaagagagaaatgaaaaatacagtagctgcagaccaggcgtgattcccatgtagactgtgcagagaaaactatgattaaattaaaaggctgtcattttccatatatgaaaaaactacccataggaaagtgtgtgtcagtattcatcaaaaagaaattgaagaaattcatgtagagcataaaatgtgatcagatgtccactgaattgacaggcacccttcattgcttcatgaatgtgctcagatcttaactagtttgctgtttgtgacactctgtagacaggtacatgtctagctagttgacatattcaaggacacaaatttctatttttttcgtgacaaacatctcatcattatggcaaaagaaaataaattagtaataatgctgacattttatatattatgtgtcataatgatataataattactcattgtaattaataataaattaatgatttttgcaccttctgatgggtagatacaatgctcaaattctccatagaaaagatatttacatttttaaagaaaaaattataattatgtcattattaattgttaatgttcatcacttagtaattatcatttttaggtgactaaagactgacattttgggcatgtttaagcactgaattttgacataaacatgtcattcaccagatgtgtgtccttgtgtgatacctatcttctcagagccttcatttcttcacttgcacaatgaggataatatattttgcagagaagtggaaaggatgagaggcataacctctaaagcataatatattgccagatgcaggtgccctggaaatggtaggtattaggataatttgttacacttatcaatttctgctcaacgaaccaccccaaacttagaggtgtaaagcagaccattttattatggctgcaggttctgtgggtcaggaattccgacagtccacagcagggctagcttgtatcagctccatgatgtctgtgacctcagctgggaagacttgagcagttgggggtgacccaaaaagcaggaaactgggctcatctggagggtttttcactctcttgcctggtccctgggctgagctaggactggcagtgatgagatccccttctacagcccctccgggtgtcctgggcttctactatcgaggcagctgggcttccagaaggaatgtctggagaatgaatattctgagaggcccagataggtggcttttgatggggggacttccagagtcacatggtggcatccaccacagccatcacaaggctggtcaagttcaaggcgatgggacacagaccccacttcttaatgggagaagtgtcaaagaataggaggcccatcaccatcattatcattacactgtgagtatgtttcttgaatatgagtaaagaaagaaagtttttcatcatccaacaggaattaagtgaatatttgcttcaagaagttatccagttggctggatacagtggctcacacctataatcccagcactttgggtggccgaggtgggaagatcacttgaggccaggaggtcaagaccagcctgcgcaacatagcaagaactcggccccacaaaaaatttaaagattagccaggcatggtggtacatacctgtagtcccagctactcaggaggctgaaatgggaggattgcttgaggccagtgggtggagcccagcttgggcaacgtagtgagacctcgtccctacaaaaaatttaaaaattagccaggcatggtggcgcatacctgtagccccagctactcaggatactgaagtgggaagattgcttgagcccaggagtttgaagctgcattgagttatgatcacaccactgcattccagcctggatgacagagcaagaccctatggaaaaaaaaaaaattatgtagttgtccagggcaggaacattaatagtgagaatgagtttgattccctaatacatagcttaacaccagattttttttcattctgtacctctaaataataaaaagatgtgatcatttgtaatgtttttttttaatatagagatggggtttcaccatgttggccaggctggtctcgaactcctggcctcaagcgatccacctgccttggcctcccaaagtactgagattacaggcgtgagccaccgtgcccagccttctaatgcatttttaactttgagaatagaagtatgagggatgctgttttttcctcatgcttgacatgaagcaaaagcaagttttgccttcactaatgtatttagttctcataatccctttacatacttacttgcctttgcctttaaattaaaaaaaaaaagttgttacctacctgtagagcagtggttctcaaactttaatatgcaatagaatcatatggaaagcttgctaaacacagattatcgggccccaccccaagagttctgattccataattgtgttcaagaccagcctgggcaacatagtgagactttgtctttacaaaagatttttaaaattatcccaacatgatggtgcacacctatagtcccagttactatagaggtggctgaggtgagtggatcacttaagcccaggagctcaagactgctgtgagctacgatcatgccactgcactccagcctggacaacacagcaagactctgtctctagcaataatacttttgaggtggggccaagaatttttatttcagtaagaagtgtctgggtgatgctggtctgaagactcacactttgagaaccactgtttctgagaaaatgtagaaccaaacccaaagcttagctttgatctcaccaaattactcaactatgcaaacctgcaagagcttttaagtgtctcgtaatcgcttatgagatttatgtactaactataagaagaacagcaacaatgatagaaactacaaccgctatcaccacttactgagtgtttaacacacatcagacatttggcaagcactttgcacccattattttatggaatccttacaaagcccactgaaatattccaattttacagatgaagaaactaaggccgtattatggctaagtttcccaacatccacagtaaatgaaaagctggacccatgtctttcagaatccaaaatccttgctcatgctcttaatagctaacttctccccatcctctcaggtggccaagagcaactcctcatcccaagagaaataatagtctctcttctttggctccttattattttatttattccttttataaaattattgttacatagtatagtgctaagttatttttatgtctgtcaccctcttcagactttaaactttattgattcatttaacaaatattcaaggtatgaattctagcaatgacctaacagagagtttgcattccataaatgcttcttgagctaatgagtgaatgaaatcagaagggaaaaatcagggcagaaaaccttgacccgtcactgtgtagatgaatgagtttctgtgaaaatgaacaagtgattgttatgtgtatatgttcgtgggttccctgtttctctaggtcacaccagactaagttacaattgggaaacattattattaggttggtgcaaaagtaattgcggttttcacaattaagagtaatggccaaaaccacaattagttttgcaccaacctaatataacagtaactaagtaatagccactggtccagccatccttggtggagtctctgcaagcccagctcatcggctctttctggcttgttcctgctcctgttcacagagtcctggatgtgtctcacaggaaccctccgatgtcactgccctgtgcaaaggatttcatcattcctgttgcaccttctgtggctcccagtggcaggacagtcgtgtccccacaggcttatgcactgctcctggggttacctggatttgacccctcctgaggtggcggtgtctgccttcctctgatctctgtgcaactgctgcgggctgagatgttactctaggcacttctaacataaaccacaagacagagacctgtgcttttgacttccgttagggtctcaaaagatagtccttttcttcttcttttttttttttcactttaacactttttaaatttttaactttttgactcttgaaataagacttagctgaaaaacacatacattgtatagctgtacaaaaatatttttatatccttattctatttatctatttatataagtgttttctttccttcttttcttttctttttttttttttttttgagacagagtcttgctctgttgctcaggctggagtgcagtggagcgatctcagctcactgcaacctctgcctcccagctcaagccattctcccaacctcaacctcctgaatagttgagatgacaggcgtgcaccaccacactcggctatttttagtagagactgggtttcaccatgttggccaggctggtctcaaactcccaacctcatgtgatccatctgcctggcctcccaaagtgctgggattacaggcgtgaaccaccgcacccggccaatataagcattttctattttttaattctttttttaacttcttatttttatttttcaacttttattttagattcattggatacgtgtacaagtttgttactgggtatattgtgtgatgccaaggtttgtggtacagatgatcccatcacccgggtactgagcatagtcctgaacattaaacccaacagtcaggttttcaaacttgcctctcctccctccttccccactctagtggtccccaaagtctattgttcccatctctatatccatgagtacgtgatgttcagctcgtacttataagtgagaacatgcagtatttgattttctgttcctgtattaatccacttaggacttttctttttttaaatccttttcccttttatttcaactcatgatctccccttcctcactaactacaaccaacaacaaccccaaccaactacaacacaggggccaggttgttcctctggtggggaaaggatggggcaagtggcggggaccctggtcaggagacagttggatctaatagtccctgactcacaatgttccacttaatgattttccactatatggtggtgcaaaagcaacacacatttagtagaaactgtatttcaaggacccatacaaccattctgctttacactttcaataaagtatccagtgaattacataagatgttcaactcttcattataaaagaggctcggactgggcacagtgtttcacgcctgtaatcccagcactttgggaggccaaggcaggtggatcacctgaggacaggagtttgagaccaccctgaccaatatggtgaaaccccatctctactaaaaatacaaaaaaattagccggatgtggaggcaggcgcctgtaatcccagctactagggaggctgaggcaggagaattgcttgaacccaggaagaagaggttgcagtgagccaagatcgtgccactgtactccagcctaggcgacagagcgagactccatctcaaaataagtaaataaataaatatgttcgttagatgattttgcccaactataggctagtgtaagttctgaatacatttaagttaggctatactaagctacagtgtgcagtaggttaggtgtattaaattcattttcgacttagggatattttcaatttacgatgggtttttccagacttagtcccattgtaagttgaggagcatccataatatgccacgcaatagtcaacgtcctgcttctatccaaacccacggtcagagtcaccaacctcagcctgtgtccttgcccatcatctctcaccaacctcagcctgtgtaattgcccataatctctcaccaacctcagcctgcgtccttgcccatcatctgtccaggcatctggggtagctccatgattactgcagttccaatggcttcatgatagtaagagcaacacttactgaactttcagttctaagccagagcctcctgtaagcacttcacatgcattaacttatcgaattctcaccttgacctcatgaaatagcttatcatcacaccttttctaaagattaaaaaaaaactaaagcactgagaggttaaataacttgcccaagattacacagccaataagtgtcagggctgggttttgaactctgtccttgcctctggacaagggttttgtctgcatcatgtggctcagtggtcctctagaccgaagctcacctagatggccccacatatcacaagagatacgtgcacaaaatagagacccccacactgcacacggggctaattctgcaagataattttggggaggaatcttaactattactttttgttttatgttaatgaatgaatcattctgaatgtgggaggtaaagactcagttcctttcttgcttccaaataacagagtgaaaaatattgtcagtagcatctttgaggaggaagggagaatatttactaagaaatgcaggaaaagaattaaaactggattgtcactgaaaaatcatatggtagctcagattcttctgatataaagttttttctatggtatggatcacccaatgtattgtggacatacagacagtcacagaaatgaccgtaaatccttccttccaaacagagagaggtaaaaggcaccttgggacctgcactgtttaagctttttttgtttttttttgtgagacagagtcttgctctgtcgccaggctggaggtcagtggcgcaatctcggctcactgcaacctccgcctcctgggttcaagcgattccccagcctgagcctcccaaatagctaggatgacaggcacgtgccaccatgcctggcttattttttatattttagtagagatggggtttcaccatgttggccaagatggtctccatctcctgacctcatgatccgccctcctcggcctcccaaagtgctgggattacaggcgtgagccactgtgcccggcctgtttgagcttattcatgcaaactttagcagacttgactgggatttttactaacagctctaatcctctggggttttcagtgacagatgcagaacgttgaccaagatgggtgggggctgcggggggaagaaaaacagaaaatccctcaccccacagaaaagcaagagttggttgatagttccagttttatccttgagccacaccgcatgtaatttttctgcacatgaaaacatctggctcagatcatcatatcttgaaaagaagagcaagctacacattttcaacaatagagctgattaaattatagtgcagtgcatccacaggaaagaggcttggagccatgaaagtggctttggaataatgcccaataatagaaaggaaagcattttacaatcgctatggtctgtatggacccaccttctcctcatgtctttatctctatttcccacccacttctgaaggagttcagtttggcttctaccctcaacactcctgcactgataaccagggaggtatctgtgcagttaaagccaaaggtcattctttcattttcatcttgagaacattcagtatcctcatcgtgtttgtttcattcattcattcattcattcattcattcattcacattttcttttggacatgagagatgatgcattaaatgttgaaaaacatcttggccaggcacagtcaagatcacatgtataatcccagcactccgggaggccaaggccggcagatcacctgaagtcaggagttcgagaccagcctggccaatatagtgaaaccccgtctctactaaaaatacaaaaattagccaggcatggtgccacacttctgtagtcccagctactcaggagggtgaggcaggagaatcacttgaacccgggaggcagaggttgcagtgagctgatattgcaccactgcactccagcctgggcgacagggggagacttcatcaaaaacaaaaagaaaaaaagaaaaagatcttaagagataacagcatacagttattcatagaggtacatatcatttcttcttaggattacaaaagaagtgtgtcttcacttctttacattgacaatacaaagattctaaggcatatggaacaggctaggaccctcaactctttgttactcaagcccttagtcttgttccttacaacttttagagctcacaacatgatttttaggtttatcaaaaaatgtcatgaatgtttctatatttcttgttggtttatttctcattattgagttatatattgctggaagtttaacaacttctcttgaattccaacaggaagcatttgctaggtaggcatttggtacctaatggataatctttcatgatggataaatctgccacatcagtctctcttgactttgaaaattaaaatctgggcactttgggaatttctgctgtcttaattggctggcctgtcctgtgaacagccgtcttctctaaatggtataataactgcatttcagcgctgtctcattgtgagtctttttgaaagcttttaaaatgatgttgtgtgatccaaatttaaattaatagttaagcagtgtgttctaccaccaatgcaaataactcaactgaatgacaattggatcctgcttcactcagtttgcgcataaatggttgaggaaaactacatcataggtgacccccgttggtggtagccaaatttcatagtctactgtgtgaaccatcatgatttcagaagcactaaaatatagaaacatacattcttggccaggcacagtggcccatgcctgtaattccaacactttgggaggccgaggtgggcagatcacttgaggccaagagtttgagactagcctgtccaacatggtgaaaccccatctctactaaaaatacaaaaattacccaggtttgggggtgcatgcctgtaatccgagctacttaggaggctgaggcatgagaattgcttgaacgccggaggcagaggttacagtgagccgagatcgcaccactgcactccagcctgggtgacagagccaccctgtctcaaaaaaaaaaaaaaaaaaaaaaagtatgttcttgaatagaagaaatatgttgtcactatttctccttttggtttcagtgattttttttaatgttctccagcaatttgtggatttattttgcaattagaaacaactcacaaaacaactaccagttctagcgtgggctgtggtagattgagcctttcagagagtgtatgaagtggtggtttcagctctccagtggctgtatcctgccttctaagcaaagcctggaatttgtgctctgcctagggctgatgcccaaacctcagtggacaggcctggttttcattactccagtaataagcaagttcattacttcattgcttggaatctttagcaaatatcccctctgggctcctggaagttaaaaagccatttgacactaatatgctcatgctaagtaaaagaattttactaatcgcccaggaaaatcttccttgcactagaaaatgttcatcttccagttgatgttgaatgttctctccacaaaaataataactgaggtaaagcatttgttaattagctagaactaagcattcaacaatgtacacatacttcaaaacatcctgtttcacatgataaatacatagaactgtatctgttggtttaaaaaataagttttttaaaaagtaaaaaataaattgtcttccttgctgaagccaaatgaaaaattgagtctaaaatattttaggttctcccacttcctccttctccatttccagcttggagttggaaggagagaaaagattaatttttctacatcattgctcaaaatcttgtgattaccagaaaagttccacttcagcctgtttattaagtaagacatctagatccaggcatctgtttgcatctcctttttaaccaagctaaaggtaggtctcaaggccatggccagatctggaccttggcttaacattatctgttctagaggcggaaacgccatcatgtctatgaagacataacccagttttagaagtttctagaagcagtgatgtaacagacacctccctcctttgagatgagaacgtggctctatgaaagcaggtttctgtttgactctcgctgatgtgtccgtgtcttcccttggtttttctttttcttttcttttttttttttttttgagatagagtctcactctgttgtccaggctggagtgcagtggtgcaatctcggttcactgcaacctccgcctcccaggttcaagcgattctcctgcttcagcctcccaagcatctgggattataggcccctgccaccacacccagctgatttttatatttttagtagagacggggttttgccatgttggccaggctggtcttgaactcctgacctcacgtgatctgcccacctgggcctcccaggaatgagattacaggccggagccgccgtgcctggccttcccttgctttttctttgtgtggatttgagtacatgtcagatgtgctgtgtgtgtctaagtgtgtgttccacctgtgtttttccttcacacaatcccaggccctgatatgttgtctatatggcttattttctggagcagacaggaacagtgtaatgaaagagatcagacttgcgtttaaatcccatccggccatggatgtcctgtgtgatcttgggcatgtcattcgaactcctgaccacaagctcctcatctaagaaaagagtgatattatctacccccacatggtttctatgagatttagaccagataatatatcagcagtacacaggagagataatattttttttcctttgcatagtctttccctgctactgcttttcattctgctcttctcccttcttccccttctctgttttttgtttgtttgttttgttttgttttttaacccaggtcgagtcaatttcaaaggctggttctgcttcttttattctccagcttttcattttgaaaagtttcaaagcttacaccagtgcagtggttcatgcctataatcccagcactttgggaggccaaggccagaggatcgcttgaggccaagagttcaagaccatcttgggcaagatgctgtctttataaaaacttttttttttttttttgagagagtctccctctgtggcccaggctagggtgcaatgccacaatcacagctcagggcaacctccgcctcccgggttcaatctattctcctgcctcagcctcccgagcagctgggattacagatgcccgccaccacgcctggctaatttttatatttttggtagagacagcatttcaccatgttggccaggctggtctcaaactaaaaatttttttaactagctgggcatggtggtgtgcacctgtagtcccagctacttgggaggctgaagcaggaggattgcttcagctcaggagttcaaggctgcagtgagctctgattgcaccactgcactccagtctgtgtgacagagcaagaccctgtctcaaaaaaaaaaaaaaaaaaaaaagaagaaaagaaaagaaaggaaaagagacagttttaaaaagttttaaaacttaaaaaaagtaagaatcgtgtaatggacatgcatgtacccttcaccaagattcactcattatttacattctgctacattcctgctttatttttttcaccatttatctcttaagaacaaagacgttctgtctttgttacacaatgcatgtatcacagtacagtaaatgtacagtaaatgtgatcatgctcagtaaatgttatgtgatttaatactatattctgatatatagtccatattcaacttttccaattacccaacaatgtccacttttctgtttttatttttatttatttattctttttaaggcggagtcttgctctgtcacccaggctggagtacaatggcgtgatctcagctcactacaatctccgcctcccaggttcaagagattctcctgcctcagcctcctgagtagctgggattacaggcgtatgccaccatgcctggctaatttttgtatttttagtagaggcggggtttcaccatattggccaggctggtctcgaactcctgacctcagctgatccacccacctcggcctcccaaagttctgggattacaggtgtgaaccaccgtacccagccctacttttcttcccagaccagttactttgttcattttgcagaatattcctcagtttggatttagctgatcaattcatcttgattttggtagcagtattacagaggtgaggctgtgtcctcaggggattgcatcagtggggcacacgatgtcacatggtcccattattgataattctaagtttgatcatttggttaaagccatgtccaccagattttctcaattaaaagtatttctttgataagtgttaagtaatagttttcatatagttttacttctgagtcttgttgtgcattttggggtcatattctcattttttcacctaccctggagtttgactttgcagagtggaatgatacttcaagtgaataccatgttctccaaccatctttcacctagtggtttattcattcattgtttattcttgccacccaccatggtggttgtagaattatgtcttttgaaaaaattctatcattgtctcttctactgctctctcttaagctgttaacctactttgcaatacttttgaagatttttcatgaccaaggtaggcactatgcttagcaacaaaacacaaaggcgaataacacggcctcgactcctgcccctgtggagcttgagtgaatataccatgtttctaatttttttgagtcaaggtctcactctgtcacctgggcttgaatgcaatgttagatcacagttcactgcaacctcaaactcctgggctcaagtgatcctcccgcctcagcctctcaagtagctaggtgcatgccaccacatccaactaactttttaaaattttttgtagagacgggatcatgctgtgtcgcccaggctggtagttttttaaatttatccatttatttaacaaatagtcactcagagtctatcatgtatttacattattctatttactgagaatccaacagtgaacaaaaacagtcaaatccctgccctcaccgggcttacaccgtagttgatgagcgggaagagagtataattagagaaagcagaggtggtagaaacagttgattttgaaataggtcagggctcagtaatgaggagacattaaagcaaagacctaaaggcagtgagagaaccgctgtttgggtgagtagggaacaggtgttccaggcagagagaaaagcatgagcgaatgcacgctcacagggttcgagttacagctgggaggctcatgtgagcagagcacagagataaaatccaaggggccagtgagtggggcgggaggatggaggcggttgagaaggtagctgaatgtgtgaattagaaggaggcgtttggggccaggcatggtgtctcatgcctgtaatcccagcactttgggaggccaaggcaggtggttcacttgaggtcaggagtggcgcatgcctgtaatccagctactcagcagtctgaggcaggagaatcacttgaacctgggagctggaggttgcagtgagccaagattgtgccactgcactccagcctgggcaacagagcgagactccgtctcaaaaaaaaaaaaaaaaggaaaagaaagaggcacttgggctggagatgtgctttgggggttggcagcatatgtatggtatttaaagccctaagagcaccaagggagtgagtgtagaccaaggctgaagagaaatgaggtcaggaaggatgaggaggaacccacagagaaggctggaaggagaagctggtaaggtagatagggatggagccagaatctctggggcctgaatcttacacaattttgggaggctcccttttaaaaagaagggatttttttctacttggggtgggagatgaagtctccctttaaaaaaatacaaaattgtcaatgaaaaattaaggacaagagggaatatttatttagagccaaaaaggaaatcacaatgaatgaccaatttttaaaaattgacatatataacaaacatgtacatgtacccctgaacctaaaataattttttaaataaaataaagaaaaatatttaaaatcatggctgggataggagacagcaataatttataaagtgtataatttataaagtgtatttgttattaatcactagagatcactgaacccaaaaggacttaactgtgatactttactgtgaaaaaatagttttcactgcctaaaatgaaactctttattttacagcattattagaatatgcaaacatttgaaaaaaaacaataaaaataaaaattgacacgtaagtgtatatatctaaaaagcaacattgtaatctttatgatgattaaataacttgctgatgtatttttcctacgcttttggctgcatattcttttaccttctcttcctatagggaataaatttgaaatacaattttctgtatagatgatttagtgtctcctccagcatggctgatcaaaattaatttttaggattgagagttgagaagaagttgacttttgcttgacagctctagatggtaatgcctcctctgtaacttcctctgtggtttctagctctggcggtacttcttgccagtgaacaaggcctcagagaagtgcagcctttgttcttactaacatggcaccctgtggcatccaaaggcccaggcgacagctggactgtttggccaggaccacagaaccatcagttcccaccaccctcccaaatcctgagctggagctgggggtgacataaggtagccaggaagcttggatcaaggtgaccccgggcaaggagcagagcagagcgtttccttcagatcttctccttggattgggacatgagatctaatgtccacgaaatgcatcatgggagggcttttgctggactccaagtaaagtggagatagtgctggtagtcgcctgaccccactccaagacctaggaaccctgacccaggtgacctcccagcaacagaacagtgttgtgttgtgtgctgctgctggggtgccagaggagacatgtggcatcagaagggtcctgcaagtgagaagccctgaaatgtaagcttctttgttggcttcaaggtacattggcctctgtgaggaggaaaaccaggaaagaaaactgtcaggaaagccaagtgaagaaaatatttccaggagggagtgatcaataatattaaaggctgtataagatgctgactgggaactaaccattggatttcacaacagagagatcattggtaatctcttctttcaaaataactttaatattggaatggttgagctgcttcttttttttttttttttttttttttttggtaaacatgggatttccccatgttgcccaggctggtctctaactcctgggctcaagtgatctgcctacctcgacctcccaaagtgctgggattacaggcatgagccaccatacaccacagattgttggtaatcttggcacacagtttggtgacatagtgcaaacaaaagtccagttgagatagattcatgagaaaataaagacaagtaggggacagtgaattgacctaactattcacaggacttttgtttctaaaaagaaatgttcatgatttttatttattaatacaacatgataaacagagtattttctatttgtatctcttcaaaaaattctaaattgcattgtccctctggttttaggtcacagtaggtcctaaatacaaaagcagttccccattccttatatagacacccaaagtagaaaaaaaaagggaacttaaaataatctagagacttggcactctctttccaacccgtgggcatccaagtgaaactagtctacaacttgtctcccagagctggaggccagacagacagatggaagtggggatgttgggttcatatgtgctgacctctgttgtcctgtgtcaagtgttcttgcacttgagtcctggggaacatttttgggtgttgttcagttctctcacttttttctaactgaagcttgacttagcagagtgtccccaccttgtcccacccacttatttccaaattgctttgattttatgcaaaacataaatttttcactaactttatggtttgcataaaatcacagcaatttggaaataagcacatttaaaaattgtatcttttattttttgttttgttatttttgtttttattttttaattttagagacagggtcacactttgtcactcaggctagagggcagtagtgctgtcatagctcactgtagccatgagctcttgcgctcaaaggattctcccacctcagcctcctgagtagctgagaccacaggtgcgcaccactatgcccagctaatttttttggcagaggggatagagatggggtcttgctatattgcccaggctggttttgaactcctggcctcaagtgatcctcccacctctgcctcccaaagtgctgaatttcaggtgtaacccaccgcacctggcctaaatcatattttttaaaatgtggtagcccatctcattacgtgtgtgtgtgtgtgtgtgtgtgtgtgtgtgtgtgtgtgtctttactgcaaaattctaagacttttcaaagcactctcttagtatttttttaaattactgaaataaatcatttcatttaatgattagttttttatttaaaatgttatttacaggtaacttttgccatgacaatattgcttacaaaaggaccctgttgtcttggctgtcccttctgtgtgaccctacctatgtatatacacatgtccatatgaattttgtttgtgactcactgcatattagtctgaattgatcatatgaccacagtcattgtccttttgattcagtaactacttgctagcctattaagattttcaccgatctcaggggtacagtgcaaagttggttaagttggcccaagaggtttcttcaccttagttctctgttgagtgaattatttgatataatccgtaactttagagatgcttctgtttcctgttttacgctacacagaagcctcggcttcccctttctcctccctcaaacgttgcaagaacctttaaccatatgctgtgttattctgtgaaccacttcctcttgataaaacgctttcattgcattttgaaaaaatacaacactgaaggaatcaggtaaaattcaatattctaagttattttcaatcacactgtacacaggtgacttcacagtttccaccagcatttgcgagcatccgaattctgtagtgcgtatttcatcctaagggcaatcccattcataagctttttaaaatttttttctcctcttttgtatctgtagttgtaatatgtctactgatttatttcctagaaaaaaatgttgccagatggtttctaattaaaaaataataaaaatatcaaagcaaattgatacttggagagcctcagatttttgaaacttatttctcatcaattccagttctattttagttttggcaatctagtaataaactcaaaacactgtagggtaaaaaaacaacagtccctgtaactccagcactttgggaggctgaggcgggctgatcacctgaggtcaggtgtttgagaccagcctggccaacatggtgaaactctttctcaagtgaaaaaaaaaaaaaaaaattagctggtcatggtggccggtgcctgtaatcccagctacttgggaggctgaggcaggagaaactcttgaactgggaggtggaggttgcagtgagccgagatcacaccattgcactccagcctgggcaacaagagcaaaactccatctgataaaaaaaaaaaaaaaaaaaaaaaaagcagtcaatactaggatacaaacatttttctttaactgtctttaacatagaaagatgtacagtatgcagataaattcattgaagagaagaaatacagctgaggaaaacccacacagaaaaatcttccagaaatttgtttaagcctccaatcatgtctgggatcaataaatatttgatgactgacttactttgtgtaaactcgatcgatttacttatctctggatgcctcagttttctcatctaagatgaatataaaagtgttttcatttcacctagggtgtgaggatggatttaatcagtcaatgcacgtaacgcaccaggacaatccctggcatggaatgagaacacctaatagttattcgctgttatttttattattatcaggcaggtagagagcaaggggagatttctctctctctcaaccccagccatgcacagaagcaattgagtgaggagttttcttcttggtagacagacaggtagcaacttctctggttaatactgaaggctaattctaaccttcctgaacttcattgactgtgtctcattttaataattgcaaagtcatttttatacctcctctgttgtttcatttttttatcattatttattttgagtcagggtcttgctcttttgctcaggctggagtgcaatagtgcaatcatgagtcacttcagccttgaactcctgggctcaaagaatcttcctgcctcggcctcctgaatagcagggactacaggcgcatgccaatatgactggctaatttttttattttttgtagagacagggtcttgctcacaaatattctgttttgtcttttcttttcattctcagtgctctgaaattttcattctgttattggtattagtatcttagtccaagtaaagactaagcataactaaaagtacagctgaaacggtgaaatttgcaaccattcaaattagcttagacaacccgtgagtttgtaatatcttaatacggtgctataagaaatataagaaagcagggttttgacagataagctccttataaaaatgtaaataatatgagtttcttcattgtattgacacttgctgccaccgaaaacatcaactctgtaaacccaaaacttgataatcacaagaagagaaaaatcttaacaagttttttatttcatgcagaagttgttaggaccacttgtttgttttgttttgttttgttttgttttgagatggagtcttgctctgtcgcccaggctggagtgcagcacgacctcagctcactgcaagctccgcctcccgggttcaagcgattcttgtgcctcagactcccaagtagctgggattataggtgcgcaccaccacgcccagctacttttttggtatttttagtagagacagggtttcaccatgctggccaggctggtctcaaactcctgacctcaggtgatccacctgcctcggcctcacaaagtgctggtattacaggtgtgagccactgcaccaggccttttttgaacttacatgaaaaatagtgtatccttttatttgttttctgttttattaaaaaattcctatataaacaattgtattattacatatttcacttaatatataaaatagtacacttttatgactaaatcttttagttttaagtgcatcaaataatcccttaatttaataccattctgctcaaaattcagtttctagcatgaaattgtaacacattattgttataacaaaggggtacacatgaaattagttatatgatgtgaattaagaaataattaagatagaaaacataaagtgtttttatttactaaatgatgattaacctattacttgaaatgttaactgactttagattgaattagaaaagaagaaaagtcattgatactgtcactcaagttgcctcaagttgcatggtagttatcagaatttttctcaaggcaactaaaatttttggtttgaaaactgattcaggcctaaatagatgtgagccccagtgaaagttttgtttaccaacaaaacacatctgtgtgagtatcagtatttactcacctggaaatagcattggaaaaataaacagtgttatagtgaatgaggttccacaaacctgtacctatagcagcagcttagaaacagactgtttaacggctctgatagttctcggaaccatgttatttggcagtctctaaggactgcctggccctggaatgtgacatttctgagtgtgtcacaccaggagccatgtagaacatgtagccagtcaagtgagagagaactttctatgaggcttgagatctggactctagcccagttcttctcattagtctgggaagctacttaatctctctgggtttccaacgacgcatttctgaacacaaacatcaacaagatctgattcttacttaataacaactcccagttttctaagagattctataacgataacaaaaagagtgtgattcagtgtggcaaatgctgattgcaaattcatgctaagtatttttggctattttgtttagatgtcacaacaagcctaagaattaggcattattgttttccttattttatagacaaggaaactgaagtccaaggagattaaataccatgtcaagttggttgttaaggccaggatttactgacatgtttaccaagtgcagtagacagcaaatctctgctgggaatgaagataccattaaagtgttagcatgacagctggattttgaatgatcagtaggattttatgaaggagatatgcacagaggaggatattatttaaagggaatagcatatacaaagacaaaaagagttctaaaaagcctgttcagaaaacatcaagggtcctgaggccaggcctggtggctcaagcctgtaatcccagcattttgggaggtggaggtgcgaggatcacttgagcccaggagtttgagacctgcctgggcaacatagcaagaccctgtctctgctaaaaataaaataaaataatgtaaaaaaatataaataaattaaaaaataaaaggccccgaatgggacaaattaggaaggactttgaaagacacgctgagtgcctgaacgctctccacttcatcataagcagccagggaagatttttaaacaggagagtgacacannnnnnnnnnnnnnnnnnnnnnnnnnnnnnnnnnnnnnnnnnnnnnnnnnnnnnnnnnnnnnnnnnnnnnnnnnnnnnnnnnnnnnnnnnnnnnnnnnnnnnnnnnnnnnnnnnnnnnnnnnnnnnnnnnnnnnnnnnnnnnnnnnnnnnnnnnnnnnnnnnnnnnnnnnnnnnnnnnnnnnnnnnnnnnnnnnnnnnnnnnnnnnnnnnnnnnnnnnnnnnnnnnnnnnnnnnnnnnnnnnnnnnnnnnnnnnnnnnnnnnnnnnnnnnnnnnnnnnnnnnnnnnnnnnnnnnnnnnnnnnnnnnnnnnnnnnnnnnnnnnnnnnnnnnnnnnnnnnnnnnnnnnnnnnnnnnnnnnnnnnnnnnnnnnnnnnnnnnnnnnnnnnnnnnnnnnnnnnnnnnnnnnnnnnnnnnnnnnnnnnnnnnnnnnnnnnnnnnnnnnnnnnnnnnnnnnnnnnnnnnnaaatgcctgggggatgttgagctggctgtgtttaggcaagctactctgaccgatgcaataaaggccgccctcatccaggtccaaaattccagattccatggctggaattgctgatcttcacggcatcccaaactgcatgcaaattgagttaaatgtgtgagattaactctgccgtcgatataaacatatgtcctgtaaaccatatgcatcacagtacttaggataaatgtttaaaagacatagttttgaaatgtatccaggtggaaaagagaaacgatttaaggattgaaaaactgaagcctagaaatattaagcattagggaaaatttccttgtcgttcaaggaatctaagggaaagttttagcctggacaagcggcttcaaccacctcacccctcatctatccaataataacaataataatcacaaaatctagctgattttgtagtatttccatttctttttcatcaacaacttgtggttcttcccaagacataaaatgaactcagaagtgacatactcacaaaaagattctaactccacccagtcacgatgtgagcatggcttgtttgcaatgcattgcttcactgtgataactccaccccagctctttctggctgctaacccaaataagacttttagctgtcagggctgggtgtttttttttttttcctctctctctctctctctcttttaatctttattttgacctttggaaaataccacacgtacatataggcacagccctattttcttacgcttgtgtgtgtgtacactgtatacatgtgtataactcttgtctgtccatttcaataataaggttttcttgcagggaggtcaattatgtaatatgactgaatttacagattaataatttttgttaacaaactgccctgaagtcaaatgtctttttatcttcaccgtgggtgcaactgtgatccattcacaagcaagtttacttatgactgtacgtttcagcacaattttgatgttggctccacttaataactcagtaacagactctgggggaaaggaatgaaagggcaggggaaagggcagggggaaagattttcaccagatgaatgcagggagaggtcacgagaacgcgctgttgttttgagttatttccatcttaggtggatgattcactgtggcacgtcattaacctgttatatagcagtggtgtgcacagcctgagaaacgaaggcctttgggttcagtgggtttttctgactcatcgatgtcacatttccagactttattttagtgcttttccaaatttaagggttcaggagaatgaatcaatggcaagattcttgttactcaaattatatttgattcctataagcttattgtaatgctagttggcagttttgaggtcagcaaacaaatctatatttattcttataaaatggattactctcataaaaaaatctgaaatgtgttaacaccaataattactcttaataataattcatctgaaggattcctttattttctcacactattgtactcagatagaaagcaattcacatgagcagttctggaattttattgttttttccattaatttccccttattaaaataataacttaaaaacccatgacaagatttttaataccatattagttgttttgggagacaatttgtgaaaccatggagataatatctacttaaatactttctgccattttgtaggaattttttttttttttgagagagtctcgctgtgtcacccaggctggactttggtggcaccatcatagttcactgcagcctcgacctcctgggctcaagccatcatcccgtctcagcctcccaagtatgtgggactacatgcacgtgcccccacacctggctaattttttaattttttgtacagaagtttctctatgttgcccaggctggtttcaaactcctggcctcaagcaatcctctcccctcggcctcccaaagtgctgggataacaggcgtgagtcaccatgcccagccttgtaggaaatttaaagaaaggaggatatgattcagatactttgtaagcaactgtgtggggataaaaccccatggaaatgactcctcatgctgacttccctcatgaaccaggggcagggcccacctgcagccatcttcctctcttctaggtgccataaacacttttttaatcccaacaatacacacaaaataggacaaggatcttccatcatccgtcactgatgctgtgtttgattcctctctgactttccctgcacacatagacctagaccttcggtgtttttctcacctgttgcttctatacctgggtgctcacctgcctgctttgtgtggtctgacccttagcattcactgagtggcttccttggattcaaacacacacctccttgtcccatgtgtatgtacacctgattctttgggatgcgtctgccactaagaaatgtgctagttcaatggaatctagacctctcttaactaaagaccccttcttgtaccctctcaatgcctcctggccaacacagttttacaacttcccatgctcctgcaagacacctcctacactggacgccagatagggcagtagagaaaattaatacatcacatagcaattcaagcatctgtcctccaaaataaaacatgcaaaacttaaaccttgaaatgatggtggaatatgctcagtgacctctagctcagggtagtttttgtgtttctcaagagggagtgactagaaggacggcaaaagaaaagtcactgcagggagcagaacattcagatggaaaatgttctcagtcctgtttggcgagggtgataaggttatgtaggagaagaaaataatttttttcttcttaaaatagggagaaggggaaatatacgatggaaaaattaagcaagaagatttcattatgtcagatttcctaaatgataaacgcaagataattgttgaagataatttgggaagattaagtgctagctttgcagggtggatatttggaggatatgcactgattcacgcaaaatgattttacagcctcatctgttctgattgctcagcgtcaatgctaccctgggtgctaaatgttgctaatatcaactctggcttatagaacagctcttgcaaaagagttagtgccagataagtattattgttatcaccatcatcatcatttacatcacttcacttttaagaattgtgatatttttaaaatcatttggctgggtgtgatggctcacgcctgtaatcccaacactttgggaggcccaggtgggtggatcacttgaggtcaggagttcaagaacagcctggccaacatcatgaaaccccatctctactaaaaatacgaaaattagccaggcatagtggtgggtgcccataataccagctactcaggaagctgaggcaggagaattgcttgaacccaggaggcagagtttgcagtgagctgagatcaggccattgcactccagcctgggagacagagtgagactccatctcaaaagaagaagaagaggaagaagaagatcaatggaatcatttttaagaaagcaaagttagtgtgacaaagcttatttcatagacatatttaataaagagactaagataccctgattagctatagctattaaaaataaaaatatgtgactgctaaaatattaaagtcacttaaagggtgaactataagttttcaaggtaatttattcaaggaaagatagatttgcctccacttggcctatttcagcccagtaatttattttaaatacacacatgaagagataatagtattatgtttatgatttagaaagtatctttatgggccaggcgtggtggctcacacctgtaatcccagcattttgggaagcagaggcgggcggatcacctgaggtcaggagtttcagaccaccctggccaacatggcgaaaccccgtctctactaaaaatacaaaaattaaccaggtgtggtggggcatgcctgtaattccagctactcaggaggctgaggcacgagagttgctttagcccaggaggcggaagttgcagtgatgtgagattgcaccactgcaccccagcctgggcgacaagagcaaaactccatctcaaaaaagaaaaaaagaaatggagtatctttatcttttagcactgcattctgaaatatttatggaaaaataatatttgctttaaaatatctattgtaggaagatataaatggaaaaagatcagtccagttgaaaattattaaagctggacaatgtgtacatgaaaatcattattctctctgcttttttatatatttttaatttccatataaaaagaatgagatacaaatgcatgcatgtacaaattcaagtaaatattgtgatttggcttaaataatacatactgattccctacacccaccagacttctcagtatgagctataattggcattaatattacagtgttttagagcattttgaaatgtccttagaggctgagcaagatggctcaatcttgtaatcccagcactttgggaagtcgaggcgagtggatcacctgaggtcaggagtttgagaccagcctggccaacatgatgaaacctcgtctctactaaaaatacaaaaattagccgggcatggtggcgggtgcctgtcatcccagctactctggaggctgaggaaggagaattgctttaacctgagagacggaggctgcagtgagctgagattgcaccactcactccagcctgggggacagagcaagactccatctaaaaaaagaaaaaaaaagaaagaaaagaaaagaaagagagaaatgccgttagaaatggtctgcagcaaattcctcatgttacagatgaaacaattgattacctttgccaaactacataatgctagttaagtggccaaaggactagtaatgtctcctaacttcccaacttagccttgccaaaaatgtcaggaaacagagcagccagttgcaactcacagtgcgtcccaccctattttgtcgcaaacttttcctcttcttgggcaattgcttcatttggtttaggcaaagaaaggttaaaatgtaaaaaaagttttctttctatctcttttcacttggcagggctgccatttaagttctaagggtttgtccaccagtacttctaaataaatgtactaaaaactattatttcagaaatatcttttgaaagcagggaattattgggtaaatatgcttaatcactcctcacatcatttttgtgtaaggtttttttttttttttttttggagacggagtctcactctgtcacccaggctggagtgcagtggcgcaatctcggctcactgcaaccttcacctcctgggttcaagcgattttcctgcctcagcctcccgagtagctgggactacaggcacgtgccaccacacccaggtaatttttgtatttttagtagagatggggtttcaccatattgttcaagctggtctcaaactcctgacctcaggtgatctgcctgtctcggcttcccctagtgctgggattacaggcgtgatccagcctgtttctttggtgccaagaagactagtttagcctggaaaaattcaactgtggctctgaggcatttcccaacgtttggcacaatcttggatcaagcagattggatagaagccaggcatgaaatttcaggctaacataagccttcctctcaatatagtcctctcccaacttagctgcccatggatggggctcttgggggaaagagagggatgcaaagagtatcctaggatcaggcttttatgagactgctaatatctcagtttcttcctttttcagatgggtgagtcaagtgaagacatagaccaaatgttcagcactttgctgggagagatggatcttctgactcaggtaaacttccctttttaactggcaaattggaaaacaaaaatagagttgcagaatttcattataatatgacaagggagctgtcttttttaaaaccctgatatcgggggaaccagcccccgatatttcaatgtaggttcttttctattttccctaagtgacggcgggtctgagaaataaagggaagagtacaaaagagagaaattttaaagctgggtgtccaggggaggcatcacatgtcggcaggttccatgatacccccaagccataaaaccagcaagtttttattagcaattttcaaagatgagggagtgtatgaatagggtgtgggtcacagagatcacatgcttcaagggcaacaaaatatcacaaggcaaatgggcagggcaaggtcacaaggtcagggagaaactagaattattaatgaagttccatgccccgctgtgcacgcattgtcattggtaaacatcttaacagggttcaagagcagagaaccagtctgactagaattcgccaggctggaatttcctaatcctagcaaccctgggggcgctgcaggaggccagggcatgtttcatcccttatcttcaactgcataagacagacacccccagagcggccattttagaggcccccccgggaatgcattcttttcccagggctattaattattaatattccttactggggaaagaattcagtgatatttctcttacccgttttcggtaataagagaaatatggctctgtcctgcccggctcccaggcagtcagacctaatggttatctcccttgttccctgaacatcactgtaatcctgttcttttttcaaggtgcccagatttcatattgtttaaacacacatgatttacgaacaatttgtgcagttaacgcaatcatcacagggtcctaaggcgacatacatctttagcttatgaagatgacaggattaaaagattaaagacaggcagggaaatcacaagagtattgattggggaaatgataaatgtccatgaaatcttcacaatttatgttcagagattgcagtaaagacaggcgtaagaaattataaaagtattaatttggggaactaataaacgtccatgaaatcttcgcaatttaagttcttctgccatggcttcagccggtccctccattcggggtccctgacttcccgcaacaccctgaagattggcaacattatatagttctgatataattgtgacaatgatgggttaaagaaaaagcttgttcctgactatattcttttgagttcagttaatttaatacattgattagacatacatcaagctcatagtatccaaatatttaccaatagagaaatttacccccaagtttactatcctacaaccaccagcgctgagccatttccctgtggttacttctataaagactcactaataaagtattatctttgtttgattttggggttttcttgagagacagagtctcactgtgttgcttaggctggagtgcagtggcacaatcacggttcactgcagcctcaacctcttgggctcaagtgatcctctggcctcagcctcccaagtagcagggactacaggtgcacgccaccacacccagctaattttttttttcttttatagagacgagatctcactatgttgcccaggctggatatcatctttagtaaagactttttaccaacccttgaggaaatgctacattttaaagaactaagtgggagttatggtgaccttgtgattaaactgtaagaactcagtaccctcaaaggaatgtgaaaaccactcaaccatagactgagaaaaaagcccctggcatcaagatcagattgactcagaggtcactgagccccactgtcagcgccactacagcctggcagctgtagggccaggggccctaagtggcaggggccactaagccaggttacagtcaggtgggctttagaatgtcttagagtgtgctcataaatgagcctttgactaataagttaatcagctcatcacttttctgcataaaatatcaaaagaagaataagccaatattcctaaataagataaggatcttcaaaagctttctaaaaaaaataaatgaatagactgtgttttgaaagacttatttattttaggaaaaaataaaccaattctagaccgggcacagtggctcacacctgtaatgccagcactttgggaggccgaggtgagtggatcacaggtcaggagttcgagaccacgctggccaatatggtgaaaccccatctttactaaaaatacaaaaattagccgagcgtggtggtgggtgcttgtaatcccagctactcaggatgctgaggcaggagaatcatttgaacccaggaggcagagattatggtgagctgagattgtgccattgcactccagcctgggcaacagagtgagactccatctcaataaaaacaaaaataaaaaataaaccaattctagttagcatctactttatattcccaataagagtcagaaaagtttagattctatgaaagaagggataagatacaagacagttggcttagaggaaggggtgctggttaaaaggtgttaggatggcaaccatatttctttctttctttctttctttttctttttttttttttgagatagagtctcactctgtcaccaggctggagtgcagtggcaagatcttggctcactgcaagctccgcctcccaggttcaagcgattctcctgcctcagcctcccgagtagctgggattacaggtgtgcaccaccacacccagctaatttttgtatttttaatagagacggggtttcaccatgttggcccacatggtctctatctcctgatgttgtgatctgcctgcctcagcctcccaaagtgctgggattacaggtgtgagccaatggcaaccacatttcttaagatgaggactgtgttttctcctcctatggtggaggagagtttaagtgaacgtgtgtggtctctctgtacctcattcctgcagccagtgggggaagtgttctgatgggtcagagtctgggatttttgcaggaccacatttaagtattgttactgtaaggcaagaacaggaaagaagctgggcatgatggctcacacctgtaatcccagcactttaggaggccaagacaggaggctcacatgagcccaggagttcaagaccagcctgggcagcatagtaagacccccgtctcatttttgttaaaaaaaaaaaaaagaataggaaagaggccccttttagtctcttggacctgccttcacacaaagcccttttggtttttgctatttctttgttgtggccaagtggatgtactcataggtttgcttggctaaacagccctgccaacaggtaggttctcaagattgtaggctaaggaaaaattttactacgacagactgcatcctcaaacagcttttcttctccaagtaactggagatttctttatttgatgtaatgacttaagtcattacagaattttatatatatatatttatataaatatatattttatataatatatatttaatatatataaaatatattttatatatatttaatatatataaatataatatatatattatatatatatagtgtgtgtgttcaccattacaagaaattatgtgttctttataaaaattaactacctcattatcattgctctcaattgacgtggtctgtttcaagatcttccttctagaataatttttaagctgtaattttctataggggaaaaattacataaaacattttcaagttaccatatggttttcagagaacacactaagggagaaaatgtgtaaatgatacatggtttttgacttgctgagtaaagtgtgctacagaaatgtttgtatcatgaataactttgatggggggatcttttttcacagagtttaggagttgacactctccctcctcctgaccctaatccacccagagctgaatttaactacagtgtggggtttaaagatttaaatggtaagcataacaatttcttttcttaagtaattcaaaatcataatgatgattcaaatcagtatgaaactataatttgaaaactaaattaaaggaacctaaacatcatgataaatattgttaaaatcatggatttcagactgggttttactgtgtctagattgaattgagagagtcaagaagacattttcaccaataatgaaagggaacaccattctgcatttgtgaaaagtctcgaaatgatctcgtgttttaaagtaaggggagtttcttcttattactgagcccatagagtaacaaggggtagtatacaaaaatattagtaaggaaatgtcccttcagtgatagaaatcaactatttcataatgattaataaatatgaatagatacttcataatattttatttaaaatattttttaatttatatataatatatacttatatgtaatttagtctacttgacattttttcatttttcctgaacttgtcactttattttattaccaaaaatctctcagccatgcatgatggctcacacctgtgatcccagcactttaggaggccaaggcaagaggattgcttgagctcaggagtttgaaaccagcctggacaacatggcaagaccccatctctacaaaaagtaaaaaataaaaaaattagccaagcgtggtggcatgtgcctgtggtctcagctacttgggaggctgaggcaggaagatcaaggctgcactgagctgtgtttctgccactgcactccaccctgggcaacagagtgagattctatctcaagaaaataaaaaacaaaacaaaacaaaaactctgtttatttaaatggagacatctttaggccacgtgctattcatattataataagtcttgaggccaggcgcagtggctcacgcctgaaattccaacactttgggaggccgaggtgggcagatcacaaggtcaggagatcgagaccatcctggctaacacggtgaaaccccatctctactaaaaatacaaaaaattagcccggtgtggtggcaggtgcctgtagtcccaggtacctgggaggctgaggcaggagaatggtgtgaacccaggaggcggagcttgcagtgagctgagatcgcgccactgcactccaacctgggcggcagagcgagactctgcctcaaaaaaaaaaagtcttgaaacaatcactttcaaattagtgagaactccctgcaactctggaaaaagatttcccaaagacttgctgtgcctaccaaaaatgtgaaaagcaaaataggagaaaagttcaattacagaaatccagaattccaagttttatttctgtcctctggatttttttttttttttttttttttcaggcagagtctctctctgtcacctaggctggagtgcagtggcgggatctctgctcactgcaacctctgccccctgggttcaagcgattctcctgcctcagcctcccgagtagctgggactacaggcatgcgccatcatgactggctaatttttgtatttttagtagagacggggttttgccatgttggctaggctggtctcgaactccagacctcaggtgatccaactgtttcagcctcccaaagtgctggaattacaggtgtgagccatggcacccgaccaggatttctttgtttctatcatttctagtagttttgtagtaaaccattaagtgccagtgactctttcttgataaattataatatacatcttgcgattttctctttttcctacactttttttatttgccacataaatttattattcctgccagtcatttccattaagatggtaacattcatgaagtttttttacaaaagcaggccaggcgtggtggctcttgcctataatcccagcactttgggaggccgacgctggtggatcacttgaggtcagaatttcaagaccagcctggccaacatgatgaaaccccatctctactaaaaatacaaaacttatccaggcaaggtggcgggcacctgtaatctcagctactcgggaggctgagggacgaaaatcactggaaaccagaaggcggaggttgcagtgagccaagatcatgccactgcacttcagcctggatgacagagcaagactctgtcaaataaataaataaatgctatacactttagtaaaattatgatggcaatagataacatatacttgcacatatgaaaaaagcaaatttagcctcaccaattcataacagccacatgctttataatcagttcaattaaagttaaaatttaatcaatatttcaacttaattgtagtcatctcaactaacgctttctaagcactaactcagtgcctggtatcacagtactgacaatgataggagcaatgatacccagcaagatataaacatagtgatattacactacagtaataagacactcttctcattaaggaatcaagatatacacatgtggcctaatttggatacaggacaagacaattaaaaactactgctacgtatggaaaattaaatttgtatggaattagattaagaatagatttgttttgtcttccctttaaaacactgctaaaacaagttcaaaatattttgcccaggctgggtgcgagcctgtaatcatgcttgtaattccaccactttgggaggccaaggcaggaggatcacttaatcccaggagtttgagacaagtctgggcaacataatgagaccactgtctctacaaaaaaattaaaaaattagccaggcatgctcgtatgtgcctgtagtcccagctactcgggaggctgaggtgggaggattgcttgaacccatgaggtcgaggctacagtgagctatgatcctaccactgcactccagcctgggcaacagaggttgcaatgagccgagatcatgctgctgcactccagcctaggtgacaaagcgaaactctgtctcaaaaaaaaaaagaaaagaaattatatataaaaaaggcttacagtaaaataaactgtttttacacgtttaggaaacccaaactttagtccaagtactgtaaactagcactattagcattactggaatatgctgtgtgacatttatgatgatgatgtctgacaaagcttatttgttactgagtaggctttattccagctgctcccatttcctcagtctgtttcatcatatctatagcagctagaattctcctcatggatcacttccttcctgtctgtccatcctttgttcattacattcactatataatgtatgcctgatcatcaaagtactccaccaagactactcaccaacaccaccccaactacaccacatgatctaatcaacattcaggatcacacatctgctctaccatagtaatctcacacctggaagaaatcctaaggagatctctcctccctccctctcactctgaaaatttatgtctttcctttcttttaaaagttaactcccagcttactgtcttcattaagtttctaccatttaatcccataattttttaactccttgccacctatggtgttttaatttctgctatttatcattaatggctcttggctgggcacagtggctcatgcctctaatcccagcactttgggaggctgaggtgggaagattacttgagtccaggagtttgagaccagtctgggcaacatgacaaaaccctgtctctacacaaaatacaaaaattagctggacgtagtggcatgcacctgtagtcccagctgcttgggaggctgagttgggaggattgcttgagcctgggaggcagagattgtagtgagccaagatctcactatggcactccagcctgggcaatagattaagactctgtctcaaaaaaaaaaaaaaaagaaagaaagaaaaaagaaaagaaaaaattgctctctctctgaatatgaagttttctacagttaggtggtgaggctatagaagctccgtcttcaccccaaagtcacaggcacattaaatccccattggttgaaatccaatttcttctaaatagcagcagtactctctttgccctccaaatgcttagggaaaactccccttccatccatttccaatgctcccccctctgctacttttctaaaactctaagatgttacattataggatttcctacttaggcatctattcgtgtgcttggatttgactttatagctggtatgtcaggtgccccagtgtagagaacacatttcccccaatattttttcttggtgttagaaactcagtcggattaaccatgcaacaaatgcagcaacagttcttttaggaattcctacgcttgtgctattgaattaaaatattctcaatcttctcatatcataaccaatcaagataatgattcctttctactcaaatattatgcttaaaaattatcttctttcagtttttccagatgcaaataggtttttataccattaatgtgattttccctactagagtccttaaatgcactggaagaccaagatttagatgctctcatggcagatctggtagcagacataagtgaggctgagcagaggacaatccaggcacagaaagagtccttgcagaatcaacatcattcagcatctctacaagcatcaattttcagtggtgcagcctctcttggttatggaacaaatgttgctgccactggtatcagccaatatgaggatgacttaccacctccaccagccgatcctgtgttagaccttccactgccaccaccacctcctgaacctctctctcaggtaagtatgtgggaccagagatggcaggaccatcaacctctgctacctatcactgatgttccttgaagtgatcattacattcctaagttggtacatccaaagatctgagatactaaaaaacaaagatacagagcacgctcattgcaaagctagaaccctccgtaagcaagccacatgggtgtgtatcaagaatgtattagggccatattcaggatttactgtagtttgcttaaaaaatatttgtatgcaaaaactatttgataaaactcaatcttttgggggaaatgttttattaacatcatattgaaatgtggaactgattatatatttccatgtccctgttcttagctcagtacatagagaatagaaggcattcattatacattttctgagtagagtgaaattgaattttgttgaacttggcagccctgttcagtaggacaggtacatccaagtatcacttgtaatgtcatagttggggagggtgttacaaagcaggcagatgatgggtgcttgatattgataaatttctgaatattgaaaaacagacaactggaaagtttaaatgatcattatttgggatgttaactcatagtatgtctctcataaaagtaaaaagagcacttttaaggattttctttttagagtaagccaaatattttagaggagagtccagttcaatttcctgtggcttctacaatggtcacactgtgtcatgatgtttggtactcacaaataagaccctagggaccccgaaaggtcatacaatgccttttgaatgaacaaatattgaatataaatcaaatattaaattatactctatcacacacagtgctctattgtgtacttattatagaaaatttatgtgaaaatggagatcgatatagaacagagactcttaatgtatggtccatgaagatttcgagggggccatgcacccgctgaaagtaaacaaagtacaaagttgaatggacttgtgaagctttatgggctttcttaaaggggcttgtggctcaaaaacaatttgagaaccactgctataaaaagatacatgcctatattcaagtaattagaatgtaaccagaacagctcatttcctcaacattataaatagaagagatacttaacttgcaaaaatcaaagagctttgggctcataaaatacttcactcacttttcagcctgttcatatgagcttgtcagtgcttttgttttttggtgaattgtaagtttaaatttcagtctcttgggccaggcgtggtggctcacgcctgtaatcccagtactttgggaggccgaggtggacgggtcatgaggtcaggagatggagacaatccaggctaacaccgtgaaactccatctctactacaaatacaaaaaaattagccaggcatggtggcaggcgcctgtagtcccagctactcaggaggctgaggcaggagaatggggtgaacccaggaggcggagcttgtagtgagccaagatcacactactgcactccagcctgggcaacagagtgagactccgtctcaaaaaaaaaaaaaaaatcagtctctcttaacctttgggggcattaagaacccctttaagaatctaataaaaaattggaaatccccaaaaagacatcctgatccaaaagtatgcatataatttcagggaatgttcaaatccctggagatgtgtcaatctatagattccttaggtcggatcccagtttgtgagccaagcggatttttctggtctaaatatacgaaccactgttaaagtcatcatttcatcttttaagttaccattcccaagctataaagagtgactgccttctatatctttgagttgaagaattttgttatagtcatctaaattctgaaaattgaacgtttcaggtaatggataccccatttatccagatgtaattattacactttgtatgcctttaaaaagtaattaataaattctgaaaatcaagcatgtgaaatttggtaccttttgttaatacaacgtagctgagacactagcaatgacagaagtgattactcactggtattacttaatggactgtattgaagaatatcttgcccttttccaggaagaggaagaagcccaagccaaggctgataaaattaagctggcgctggaaaaactgaaggaggccaaggttaagaaggtgaatcatgaatcccttttgcatgggggcagttcaattaaggacctgtgattatgcttaatgataaaaaacaaaataaagccgggcgcggtggctcacacctgtaatcccagcactttgggaggacaaggtgggtggatcatgaggtcaggagatcgagaccatcctggctaacatggcaaaaccccgtctctactaaaaatgcaaaaaattagctgggcgtggtggcaggtgcctgtagtcccagctactcgggaggctgaggaaggagaattgcttgaacccaggaggtggaggttgcagtgagctgagatcgagccactgcactccagcctgggagacagagtgagattccatctcaaaaacaagaaaaaaagaaaaaaagaaagaaaatgttgtgtgatactttccaaatagttgtaattttcaaaaacttttaaggacaaagataagagtacacaattgttctttctataacatcagttagctcacttgtgattgataaataagggacttgtgttaatataaatgtagaggtttccttggcttgtacatgattttttttgctggcttatacatgaattttcctgggagctggaatgatgggagtagaattataccttcaacaagaaaggaaagggcctttggcttgggtgctgtacaggcaggggccctttcagctctatcttaagacattttaaaacaagtttgcacatccagggctcccttcctttgagctgccctctccaggactttgcaaaattcttggttgatagcaggtggcgccacctttggggaatgcctaactgggtcagagctcagcttctgtcggcctggcctctgcttttcctcaattgctcttgtctacttttcctatgccctggggcagccgtcagccctgctgctgacctagatgtccaagttatatcccagggtaccaaatgctgtttttgctggtgctctggtttcaaaataggttttgagtaatctgcccttaacccaactttcctaataagcctgtaagttgatcatgcattttttcagagtataggtttttgaagaacacatgtattgtattgtaacagcagatacagctgtatttaacttcactagaagaatatacctaatgataataaagtgttaataatagttaggctgggcgcggtggctcatgcctgtaatcccaacactttgggaggctgaggcgggcggatcacctgaggtcaggagtttaagaccagcctggccaacatggtgaaaccctgtctatactaaaagtacaaaaattagctggacgcagcggtgtgcatctgtaatcccagctactcagcaggctgaggcaggataatcatttgagcccagaaggcggaggttgccgtgagccaagattgcaccactgcattccagcctggactccagagcgagactccatctcaaaaaaaaaaattaaaaaaaaaaagttaatttggtaaattaaggcaaagatgaaacagtcttcatcgtgttttgttttgagacagggtcttgttctatcacccaggctgatcatggctcactgcagccttaaactcctggggtcaagcaatcctcctccctcagccttctgagtagctggaaccacaggcatgtaccaccatgccggctgatttatttttattttttgtagagttgaggcctccctatgttgcctaggcttttctcggactcctaggctcaagcgcgccacccatctcagcctcacaaagtggtgggattacaggtgtgagccaccatgcctggctcttcatctgatttcaactcctgaagcaaataacatctctgagactcattgaggattttctgctaagagttgtgtgaattgtccttttcacatagggctttacgctttctattcccatggcacctatcacagttctctgaatgaaggtgttcaatacctgccgatggatggatattcaggaagtagtccttggctacccctggagccagactttcaaggttcatctaggggagtcttcccagattagtctggttccactcattccaaacgtgcccaaatttccttaccattcttctcccctgttttctgcaagtgattaattccacagtccatcattggaactccacgtcctcatctgccttgtccttttctcaaaccttggttaaatccaactttcctcctgctcagtcctgggtgcccagtgagctaccctggttcaatcactctctcacctacaaaaccattttacttaagagacaagggtctcactatgttgcccaggttggtctcaaactcctggcatcaagcgatcctcccacctgggcctcccaaagtgctgggattacaagcatgagccaccacacctggcctcagctaatgattttgttgcccattttgcaaggaaaatagacacagtcaaaacaaaagttgcgcaagctcccaccaagacatctacctatctacctgcgtgcatctgtacccatatatcccatattctttccttaacaatggataaatcattatgtttctgccgagggccagactcttctcttgggctgcagtctctctttctgtcctcctctgctcaaaagtctccgatgtctgaccatctcacacgtgaagccagaatgaatcctcccagtggcctccagtccctgcatgacatggcgaccagtcacctccctggcctcatctcccagtgttcactccttcattcaccccattctagctgcctggtctcctggctgccccttaagcactctaggcctgcccttgccttgggaccttggcactttgcaggtcctctgcctcttccctggattctgagtaggttcgctgtgcatctcctttaagtctttggtcaccttcctagcgaggcctttcctatctaacaccacatgcacacatccccagtattcccaatccttcccccactttagtgttcccctcagtgcttaacactaccgtgtgtgtgtggggggggggggtggggggcaaggtcttgctctgtcacccaggctggagtgcagtggtacaatcacagctcactgaagcctcaaattcctgggctcaagtgatcctcccacccagcctcccaagtagctgagactacaggtatgcaccaccatggcccactattttttaaaattatttgtagagaaaggatctggctatgttgcccaggctggtctcaaactcctggcctcaagcaatcctcccacttcagcctgtcaaagttctgggattacaggcatgtaataatagttaaaatagttaatttggtaaattaagggaaagaagaaacaggcatgtaattccagcactttgggaggttgaagtgggaggattgcttcgcctggcctactttacttatttgtcctatgtattgcccgtatcccctccccaccaccccacaggatctcccccagggatctttgtctcttttccccaccaatgcatccccatctcttagaataggtgtcaggatcacacagaggtgaacaagtcaagtgtggtccctgcttgtggagagttagagtctagttagactctagctctgaagaaaataaaccaggaagaagtgatagagagtacccaggcaaccctaccagctggaactggtgctgaggaggcctctctgagcaggcagccctgaaggggaggcctccggccagaagcagctggatgcatgtgggtgtggtgctggggggcattcccggcagagggaacagagagagaaatatgctccagcaagaatcagctcggggaggtggggaaaaaaggaaggaactgaggacagagaggcagctgggagacacagggtctcataggcccaaggagaagtttgggttgtattataagtgcaatgggaaaccatttgagggttttaaacaggggagtgtaagacgaatacacggcttttaaaggtcataaagggccaggcacagaggctcacacctctaatctcagcactttgggaggccgaggcaggaggatcgcctgaggtcaggagttaagaccagcctgggcaacatagcaagaccccatctccacaaaaataaaaattgtttttagttagctgggcatggcggttcacacatgtagtcccagctacaggtggctgaggcgggaggatcccttgaccccgggaattcaaggttgcagtgagctgtgatcataccactgcactccagcctgggtggcagagcaagatcttgtctctaaaataaataaatatgggtcatactggctactttgtagaaaatggattgtaggggcaaggtatgagagcaggattgtagcacaaaatctcacacatggataaacatgtagaattgatcacacatggttggcagctgaggatgagctgtgctgagtcattgactttacctctcaagataaaaagacaaaagaaaatggtaaaagtaaactttctaattagactatttcaaacccctggattatgtataaaatatattgtttatgtattttcagaaggggaaatgaaaagagaagtaagttgtttcttagattaaaagatagaacagccagcagattccattcattcgcttcagctggagactaagagaacaggaggagagggcaggtatttcctgccatatatcagacagtgagaaagtgttgccatgatttagtttagatgaattataatggcacacacaaagcacaagctgccttgattcaacaaagaagatggaaaacagaagccgctctgatcagtgaggaagaaaagaaaattacgaagacaagttatgtatttgctctgatttcagacactccgaatgtatttgttctgtggtgcagaatattaagaaaataacagacacgctcatgcattaaaagaataaccgcaatgtactcatgcataatctacaacatgtttttaaaggatggaaatcaaatctatctgtcatactttgccctcaagtattctgtgggctgttgacatcattttgaattacaaatgatgtatacagcttgtgctacaaagattttggaactagaaacagaatcagactcatgcattacttttattgtttttttaaaaatgccctgggacaccagagaacaattccatttataaattttagtatagaagcaaaaaaaaacaaaaaaaaccccccacaaaactgtaaatgatttaggtctcagaaattttgtgtttagcatcttgcaaaaaaagaagaaattataaaaaattataaaagttataaaatctttaatagatcatttaagttttttcacccttgaatcactttgccccataaatatgaaagtatttagcttgctaaatcacataactgtgatttagcttactaaatcacataactgtgatttaatgttatgtgttggtatagagctactctagcttgcaaacgtgagggaagctgtgaagaatagtaaatataatttcttcttgctaaacatcacaaggcttctcttggttatatgtgtgtgtgtgtgttttctaaattctataattgtggacattcataagtacgtgtagattaactctagtttccaatttctgcaaaaaaacacctttaatcattgccaaattatgtggtttagtattttttctctgtatgtatgtttttatagaacataaaaaacagcaacatatgttttattttcttaagaattcctaagcaggattgagatgtagtcaaacatcattaatctttccatcaggaacattaaattttctaagccttaacattggtagtgtgtcttagcacatgtagctactttacagcagtaattctcagcagagagcagcaagtacaccttccacagaaaataaatcctagtaaagactgctatttgaagaatttctctatttccatacaaccctccatgactcatttctaaggtcagatgaatggatctttgacacctaccatttatagttgggcctaccattttatcatcaaaatacaaatacagggaaaaagcaactatccaactacagatgtctgggctagagattttcaagggggaaaaaaaagtgttctttaggaaaccctgggataaggctctgatttaaatggtccctggaggaagaaagcattttgactgccccatgtctacattttgatcttgggggtgtttgtgaatgttggaaatagaaggtattacatgattgcttcaacttgtggttgctgcctgcaactcacccaaatggttaccaccacacacacccttccattgctatcagtaactctgcagaaccatctacaggaactacactcttcaacctgttaactatagagtgttaggaaagaataaagctacagccagccatacaaccctggttgtactctatctcatccgatctcagaagctagacagggttaggtctggttagtacttggatgggaggtaggaataggacagaacctggctgctcagaacctaatccaaacttgtggagagaaagaaatgttaccaaatttatggtttctctctcctttttcagtccatctaatcacttttttaataacaatgagtcttatcgttgaataaccgggaccaaccgttaagctcatatgctacaaatacacaggtatcaaagaaaatccaaagcctagctgcataacttcaagaattaattctgttacattacatgaaaatcacggtctctctaacgaataagatcttttttgttgttgttgttttcttttctttttttgagacagagtctcgctccaccccccatgctggagtgcagtgctgcaatctcggctcactgcaacctctgcctcccagtttcaagcgattctcctgcctcagcctcctgagcagctgggattacaggcacatgccaccacgcctggctaacttctgtatttttagtagagacggggtttcatcatgttggtcaggctggccttgaattcctgacctcatgatctgtccacctcggcctcccaaagtgctgggataacaggcgtgagccaccatgcccggctgaatcagatgttttaataactttgacaagttgcctagaaaaagtcaaggatattgtgtttttactgaagataagtaaatgcagcttcctccaaacctacagatttggaatgagattactaccaattttattgtgaatttaattcaatagaatattttgaaaatggaataaaaagtaaattaggggctggatacagtggctcatgcctgtaatcccagcactttaggccggtgaggcaggagaattgcttgaggccaggagtttgaaaccaacatgggcaacatagtgagaccttgcctctacaaaaaaatgaacaaaaattagctgggtgtggtggtgcacacctgtggtcccaaccactcaggaggctgaggtgggaggatcagttgagcccaggaggttcaggctacagtaacccaagatgacaccactgcactccagcctaggcaacagagcaagaccctgtctcacacacacacacacacacacacacacacacacacacacacaaatgaaaattagatttatcatgtgcctgcaaaacagcttatttctcagtctacattcatttcacttaatccaactgtgatctcaaatgtgccctgctctaactatctgtctctcagtggggccccctcagtgataccgtgttaacatacgctctgtggacctttagagaattgtagattaaccaacttggtcttatttggtgtcttcagactcttgggttgcatgaaatgggactcaactccagctaagcaaaagagaagagtttattataaagaaacaggtggccaggtgtggtggctcacacctgtgatccccgcactttgagaggccgaggtgggtggatcacttgaagtcaggagttcaagaccagcctggctaacatggtgaaacgccatctccactggaaaaagaaaaaaaattagctgggcatggtagcaggcacctgtaatcccaactactaggaaggctgagacaagagaatcactcaaacccaggaagcaaaggttgcagtgagctgagatcacgccactgcactccagcctgggcgacagagcaagaatccatctcaaaataataataataataaagatacagacatagcttttaatctagaaaagtttctgggctccaggatggaatgagaacaagggaaagattattgggaaagaaagaagctaacactttttttgttctgttgttttctgtctctcccaccagactgcctgtctctgaaggctagacaaggactgtgtttattatctattttctatttttgtgaattggtttctccacctctgtaatcctagcacctaaaacaagtgcttggcatgcaagttagtttagatggagcaagttcaccaaacacattcttacagaaatttgcagaaacaatagcaactttgaaaccctcatcttagtagccttctccagttgctgaaatttactggctgccccatggttctatcctcagctcgtcgtcaaggtgcacatgaatgataacagcacaaagtcactgatggtggatgagcggcagctggcccgagatgttctggacaaccttttcgagaaaactcattgtgactgcaatgtagactggtgtctttatgaaatctacccggaactacaaattggtaagtcccatccccagcaatgggctgtactccaaaaaccttgtgggtttgctgtataatgggcttgggtttattctttttttctctttaattttatataaaaaatagacacatgctctcactatgctgcccaggctgatctcaaaatcctgtgctcaagcgatcctcccacctgggcctcccaaagtgctgtgattacaggtgtgagccactgcgcctggcctggttcatccttgagaagactttggttcaaggctttcaattcccttatatgagatttagtgcttgactcttcatttcattgtagtgaagaacttggattctagcaggtggtggccagaccttgggggatataagcactattactgctgcttctctagtggttccataagggaaagagagtggctggatgatacttactaagatgctgcatgcttaataagctgagcaggtggcaggagagcctgggtatctgttggctaatgcccctttagtggttgcttccttaactgaccataaccctgccatagcctcccacaagtgctcatttccccttcctccctccccactggcttagtctctgatgctttgtctagtggaagagtttcagcctcagtgcaaagaacagttggtagacactgatggaatttttcaaaagtggaaaaaaaggttaactgaagatatactgttacttattcttggtggtggtggtggtgttgagacagggtcttgctctatcaccgaagctacagtgcaatggcgcaatcacgggtcactgcagcctcgagctcctgggctcaagcactcctcctgcctctgcatcccgagtagctgggactataggcacacatcatcatatttctcatttttaataatgggacagtcgtctctcaggagagctgggtgggacggagaattgcctgtgctggaagctttgggagcaattttttttctggataagatggtttacactaaagcagtcccttaaatttctcttcaattctgtgagtcaagggaagaaatgaaagcctttctttatgttttaattcaagcattcacacattgcttttagagtgttaaggagtgatgttttagagtacacactggctctcacaatttcattcaaagtgtttcaccagtcattgactgattgtccacctcacgtagaatgtttgccaccatctgggactatttaaagtaaaaaatgtcgatatgaaaaaagtatgtctctgggtacactggcatatgcctgtaggctgagctacttgggagggtgaggcaggaggattgcttgagccttgagcctgtgaatagccactgcactccagcctggacaacacagtaagaccccatctcttaaacaaaatgaaagaaaaaaagaaataagtgtgacagctgaccattgtcactgtgttatgggttttttcatcttgtttataatggaagataacttgaagacaatgaaagagaaacataatagaaatgttacagtgtggcatcatgtgagaattattaataagaatcccaggcacctgatgaaagtcatgaagcattaactcaataatagcttgtttctcacttggaaaccctgatgtcttgggtctgaaagaataccttttcttatttcatcagagaggttttttgaagaccatgaaaatgttgttgaagtcttatcagactggacaagagacacagaaaataaaatactatttttggagaaagaggagaaatatgctgtatttaaaaacccccaggtaagatgatctgcatattgttaaaccctataaagtacaaaggattttttttttttttgagacggagtctcaaaggctggagacagggtctgaaaggctggagacggagtctcgaaggctggagtgcagtggcgtgatcttggctcactacaacctccgcctcctgggttcaagcaattctcttgcctcagcctcccaagtagctgggactacaggcatgggccaccaggcccagctaactgttttgtattttttagtagagacagggtttcaccatgttggccaggatggtcttgatctcctgacctcgtgatctgcccacctcaggctcccaaagtgctaggattacagacgtgagccactgcgcccagccaaggattttttttaatgtcacctgtatactaaccacaccattcattgtctcacaaaatatcacaaatatattattttcaaataaacacaaactcaactcttaagctatatgtacgctaacagtcctttgaaggattcagaaagaaaagaatccattttgctttttttcattccaaatccaaaacctatctctctgtggttttctcatcctcttctgtccctgtttctgtgtggctgtattaatccaatatatcttcatgcactcactgttggttcttcctgcttcttgcttgaaagatgctcttttctttgttgtttgtatttggtgcttatatttgctaggaaaactaaaaggactacctagaaaatgtgcaatttattgtgattttgttgcaaacaatttgtgcaagtaaaaagcataaatttatatttgttcttcttttcatacttgttcatattggttcttcatgtttggaaatgcttccttcaagtcatgtgtacaagcatgtccaggatttttcccaactgtggcctcaagcaactataattgtgtgagggtcattactttctttttgaaaatcaaagaatgttaaaggtgaagaagttcctctccattttccagacacctttcccttttacaggttaaaaaaaaaaagtgtcatatcactagagggagaattagggcagcttccttgcgggaaaatttctcctataaatgctattttctgggttttccctaggttgtatggtggctgactgacaacacaacaattaaatagtattaaaagtacaaagtttttcgcccctaactaccttcaatgccatgcttttttctttttcttttcttttttttttgttagacaaagtcttcttctgttgccaggctggagtgcagtggtgcaatctcggctcactgaaacctctgcctcccgggttcaggtgattcccctgcctcagcctcccaagtagctgggactacaggcgcatgacaccacccccggctaattttttttttttttttttgtattttagtagagatggggtttcaccgtgttggccagggtgatcttgatctcctgacctcgtgatccacccgccttggcctcccaaagtgctgggattccaggtgtgagccactgcacccagcccaatggcatgctttaacaactgcgttagtgagggtaccatctaaattgctgtagcaaagagactcttaaatcagtggttcaaacaagctacaagcttatttctctctcacgcactggtccagccacaggtagctagacctagtagaatggctctgccattttcgatatgtggtttccatctttggttccatgttagcttttccgcctcaccattttccagtccatatgaagtgagggaagagccggggaaatgcacattcagatttatgcttccatcccattggccagaaattagttacataatgacactgagctacaaggaaagctgagaaatgtagtgtctatctgaacaaccatatgcacagctaaaactagggagttacattcagggccaccactttgcataactcctccatgaggcacctttccccttgaatctataaaaataatgcccaagagtcatgcaacatggctatgctattgtataactaagagaaggaatagctattgtataactaagattagccatggtgggagagccggagattacctccatacccctttaggctggatcagatattacctccatacccctttaggctggatcagagattacctccatatcccattaggctggatcagagattacctccatacctgtttaggctggattagggattacctccatatccctttaggctggatctagaaaccaagttgacaccagggagattaacaagaggaaagtatgcacatttttatcagttttacatctacatggggatcttcacaagagtcaagtctaaagaagtggccgaggcaagatgcttctatactttttaaacaaataataaatttgaaaaaaaaatgacagaacaaagggaatctggctaggggcagtaaagtttctaggggagtgtaaaccggaaagtctctgtgacaggtctcaatcagcttagaagtttcttttgccaaggcttaaggacatgcccagaagaaaacaaacaaacaaacaaacagaatcacagaaacagtctgtggtctgtgcccttctccaaagatgaatttgagggcttcaatatttaaaggggatgccaggcacggtggctcccgcctgtaatccagcactttgggaggctgaggcaggcggatcacttgaggtcaggagtttgaccaacatagagaaaccccatctctactaaaaatttaaaacttagccaggcatggtggtgggctcctgtaatctcagctacttgggaggctgaggaagggagaattgcttggacccaggaggcagaggatgcagtaagccgagatagcaccactgcacttcaacctgggtgacagagcaagactccatctcaaaaaaaaaaaaaaaaaaaaaaaagtaaagcggaaaagtcaaggaggggaaagagggaggggtgtggtaacgcacacattgcaagagaaaaggagcaggtaggggaagagtgaatggctgtattcctctcgcactcagtaagttggaacttcacagaagataagatgaacatagagttgctccctgtggagatatttaaccttttatttgtagctgtctgtttaggaacaaaagggaaggcaacgtcttgcatgactcagctttcagcttactttattccttttggcagcgtgaactggggtcccgcgtttttattttcctttcactagagggcatcaccagaagatatatggggggagataagggttactttacctatagtggaagataagggttcctttgttgagtatatttattcagctcctttgcagccccgttcccagtctctggtgataagggctattttctcgccccgaaatgctgagggttcccctcccagaggaatcttgatggcttgctgcctgcaggaagaggaggtcagctcaccctttctggaaccgcagtttctccaatgttttcaactagaagtaatcagtgcaccaatctagcatttttggggatggcatgtctttcagtccttcagtgggcatctgcagtttgccatggtaactaatgaactagtgcacatatcataatggtacactctgaatttttacaaagtgaaccaacccatgtaattaccacccacatgaagataacagagcattcagggagttgcagcggccttcctcctggcccttcccagtccttactacccattacaaaggtcgtcatgattctagcctctatctccttagcatttcctctttttgaactttatatatgaaatggaattatatcacagtacttctttctttttgagacagggtctcgctctgttgcccagccagatcttgcagtggcacgatcttggctcactgcaacctccaccttgcaggctgaagtaagcctcccgcctcagccaccagagtagccggaaacacaggcacaggccatcacacccggccaagttttgtttttgtttttttgagagacaggctctcaccatgttgcccgggttggttttgtttagctttgctttggctcaactctcattcatgctgttgcccatagcactagcttattctttttcactgttagaattccattgtgtgactataccaaaacctatttatccattgtcttgctgatggatatttgacttgtttctagcgtggggctttaacaagtaatgctgttgggagcattcttatacagtacatgtcttttgttggacatgtgtagacatttctcttgcatatatacctataggtgcaattgctggaccacaggttgtgcatatgcttagttttattttttattttatttcatttttgggattgagtcttgctctgtcacccaggctggaatacagtggtgcaatctaggctcactgcaacttctgcctcctgggttcaaacgattctcctgtctcagcctcctgcacagctgggatcacaggcaaccaccaccatgcctggctaatttttgtatttttagtagaggcagggtttcaccatgttggccagactggtcttgagctccacctcatgtgatctgcctgcctcagcctcccaaagttctgggattacaggcatgagccaccgcgcccagcctattttttttttttttttaaagagtccttctgtcacccaggctggaatgcagtgacacaatctcagctcactgcaacctccacctccctggctcaagtgattctcgtgcctcagcctcccgagtagctgggactacaggcactcaccaccacacctggctagttttggtatttttagtagagacggggtttcaccatgttggccaggctggtaatatgtttagttatagtagatactgccaagcagctttcacacagattctatgacttagcctcccattaacattgtatgagaattcctgttgttccagatccttgatagcctttggtgttaccattagtttttaaattttatccattctaggggtttgtagtggcatcttctgtggttttaagttgaattttcctgatgccagtgattgtagcatcttgtcaaatgtttattatccatttgaatacccacttttgtgaagtgcctgctcaaatcctttgccatgattcccagtctctcaccctagactaagcatcaacaaatgccctgaggggaagtgtggctttctggagacctgaacaccactttatggttcatttctgtcttagatcttgacctcttgcgtcctaattgcttcaatagctctctaatgccttcacacagattttttattaaatccagcatttctagctgttttgtgtacagcaagctacttgtattgggccattctcacactgctataaagaaatacctgagactaggtaatttataaagaaaagaggtttatttgggaggctgaggcgggtggatcacctaagatcaggagttcgagaccagcccggccaacgtgatgaaaacctgtctctactaaaaatacaaaaattagccagacatggtgggggtggggtggggtggggggcatctgtaatctcagctactagggagtctgaggcaggagaatcacttgaacccaggagacagaggttgtagtgagccaagatcgtgccactgcactccagcctgggcaacaagagcaaaactccatctcaaaaagaaaaaaagaaaagaggtttaatgggctcatggttctgcaagctgtacaggaagcatggtggcatctgcttctggggaggcctcaggaaactttcaatcatggcagagggtaaaggggaaggagagtgagcacctcacatggctggggcaggaggaagagagagaaggggcatgcaacatgcttttaaacacccagatctcctaagaactctatcatgagacagcactaaagacatggtgctaaactgttagaaattgcctcccaccaggcccgacttccaacactggggattacaattagagatgaaatttgggccaggccatgaatccaaaccattactactgtaccatagcgggaagcagaaattctcctcatgaattattttgcacaagaatatgttcttaaaagccaacttttatacattctcctaatctacaatccaatttaaagaccaaaattgaagtggaggcaattttgaagtggccaattttaagtaaatgtatttccattttctcagtgtttgaatctatcttctggccagtgctctgcatacatagtggcttctgcctgctgaccttagagtgagagaagcaggctgtgaccattctcattgatgtcatggctcctaaaagggaggctttgtaatttgaaatacctaaagtcttcttgtctaagccctgtgctaataccctttgattgtttaaagctgggcacagtggctcgtgcctgtaattccagatgcttaattaggaaggaattccaaaaggactttgagaggacaaggcaagggaattgcttgagcgcaggatgtcaagaccagcctgggcaacatggttgttataaaagtgagctcagcttgctcttgctgcctttttcatgcctgcttacttgctttctgcttttccaccatgttatgacacagtatgaaagccctcctcagaagcttccaccatgtccttggactttccaacctccagaaccatgaaccaaatagacttattttccttataaattacccactgtctggtattctgctatagcaacagaaaaaagactaagacagattaatacttatttgcagcttaattaagaaagagcttacctggcccagaatatcagtttttctggaaaattatcaaactgtaaaaaactctttaaaatttcattcttaaagtaccaatactgaagtcttcaatacttaacagacgtcttttacaaattatttgtcttgggggatagtgcctgggagaggcaagaaagtgaatgcagagggaggctttgagctccattttcagaagcaataataagtaagaattcagagacattagtgatatgcttgtgcaggcataattgctaggcatccatttccactggtgactggaaatgtggcttcacacacctaggtttcaaatgtcacctgctgtgtgatcttggtgtgctctttgacaacacttaaattcacttctcagtttgtaaaatggttgatgctgctgtacttcctacctcacaaaatcaaatccagcgtgaaaaccacttgccacattgtgaagttatgcataaaagtaaagtggtttgatctcaactgaaattcagcaatcatctacagtaaagttctgtataatagattatctataataaatgaatatagagaaactaaactctgcaaatttgtgaacagaaagatgcttaattaggaaggaattccaaaaggataacttgtctacatttggggaggcaataggagatcaccccattttaaatgagagaaaacagagtaactcttaatggattcttctgatggctgctgttatgcactgttccatttgaaagtaacttatcagctttttggaacagtctgtgttttagcttcactcccaagaggtgggagccaagtatgagtctaactattgagatttggtgagggtgcaagaccatcattggttctccagagccactgctgaaatctgagtgcacagacactgttagctcctgccatcaactctcagtggtgatccttgggtataagaacagatattgctctaattagaattttttcagattactgaaaggacccagaggcatctcattggaatgaaagataggaagtacagtcaggcctcccagggactggtgcaggggttggagcgttgctgggatcatgatggcaagcatcttggtcccagccctcccttgggtctccatctctctttgtcactctctgtccctgtgcacagctgtgtcattcttcttccctttggtggacttccttcctcagcttacttatctgttcccacatagcccctatagccaacctcagacgatggctcctctataaatggatctcaaactctgtgcttgcgtaaccctagaagaagtttgaaaaaccatgtgccacctcacacatttgtttgttgacatccaaattttttcatcacaagtttatttattaagtattattattattattttttgagatggagtcttgctttgtcacccaggctagagtgtagtggcatgattacgactcactgcaacctctgcctcccaggttcaagcgattctcctgcctcagtctcctgagtagctgggattacaggcatgcgccaccatgcccagctaatttttgtatttttagtagaaatggggtttcaccatgttggccagactggtcttgaactcctgacctcatgtaatctgcccacctcggcctcccaaagtgctgatattacaggcatgagccactgcacccagcctacaagtttaaatagatacgaagaatgccatgtccaacatattttgaatgttgacagtttaaaaaaactattcaacggaatctaaatacagttccatgacaatttgattcccaccatcatctttttaagaagcacatgaataagtttttattttttttatagactttcttttcagaacagttagattcacagtcaaattggacagaaatagaaagagtgcctatatatcccgtgccttcacacacacacagcttcccccactatcaacaccctccaccagcatggcacatttgtcacagttgatgaatctacattgacacgttattatcacccaaagtccataattgacattaatcttcacttttggtgatgtacagtaagcttttttcaacatttgggacattttatattgttccttttttttccctttgaactgttctcatttcattttctccacaaagatttatcctattgtaatatattgatatgctgaaaagtcttttattattctctgtcccatactcctcttcaactaattatgtttacaaattgatgggtgagcttttcttttctgtcaccataggacacttaagggttaaaaaatcacagttgaccaaaacaacatggaaacctttttttattataaatgttgatattaattaaatataaaaagcaaaaatgggaggccaggcacagtggctcacacctgtaatcccagtactttggatcacctgaggtcaggagttcaagactagcctggccaacatgatgaaaccttgtctctactaataatacaaaaaaaaattagctgggcatggtggcacacacctgtaatcccagctactcgggaggctgaggcaggagaatcacttgaacccgggaggtggaggttgcagtgagccaacatcgtgccattgcactccagcctgggtgacaagagtgaaatgaaactccatctccaaaaaaaaaaaaaaaaaaaaaaccaagaaaaaaacaatggggaggggacatctcttaatgttagaaatagattaggtggagccattttccccctggttaattccaggatcaaaggatgaatttccgtatcaattacattccagtttttcatttttacagatgttgagtactttctatattgagaaaccttgttcacataaataagtagatgggaacagaagaatgccattcaattctttgaactccttccaaggtactagccaaaagccacaggaggatcaatgatggttcttttcatccattagctgaccagataattaggtaccttctattatgttgaaagcaaagaattagaatccacatgacttccaaaaggatttgtgatgagtcttcttctttctctgcactggtgtttcaagttgtccttttgtttagggcctttgagccttaccctggggcagtaagattctgtgtgggtgcaggtgagattttcctttctaacatgcaaaaaggcaactgtgaaaggggccgtccattctcaggcaggtccactttagaaaatggtacacttcaagactgaggatgtgacaatttgcacagcatgctcttggaggggcttcatgtaattataggacatggaggggcggggggacacagttgaaagacccttggccaaggccagccacagtggctcacatctgcagtctcagcattttgggaggccaaggtgggaggatcacttgaggctaggagttcaacaccagcctggaaacacaggagacctcatctctttaaaaaaaaataaaatataaataaatttcttaaaaaaagaaagaccctggccttgaatggtggctcactatgagtggctcaggcttccccatggttaactgtcctctgctttacaaagccattgtgcctattatgaaataataatttatgtcatcatttctcatcttcaacagtcaataggccctaggtggatgccagcactcagaacacagtgcccctaaactatggcaccgtggcatgctgagtactttaaaccgaaggagattagaaggaccttctaagaagccagacgatctctgtgaccttctcccaccctcctttctccttcccgcatttatcccctgaagcagattatagaaactcaacttcttctccccaaagcaagccacgaaacctagaaagatcactctctgacctcctccctttgcccctggaaggtcctcctgtggcaagcgtcctgccccatacccggggggtaaagagtgtcacacagagacacagaaacaaatcaaaataaacaggccttgctgagctcccccagtttattgccattagatcatgtttctccgtaattacccacttctttcatcagattgatgatgaaaaaaaaacaacaacaaattatgacaaaatatttaaagagggttattctgagccaatacgagtgattgagctcaaattacacagtctcaggaggtcctgaaaaagtatgcccctggcagttggcttgcagtttggttttatatatttcagggagacaggaattgcaggtaaaatcataaatcaatatgtggaaggtatgcattggttcccaaaaaggcagggcatctcaaagcagagacttacatgtcataggtggattttagggattcttgagttagcaattggttgaaagaactgagctttatctaaagacttgaagtcaacagaaaggaatgcctaagtgaagataaggaggtctgctgtctcttatgtgatactataacagaatcaggttggaaagtaagctacactctacagggttaattaaaaacctgtctcacgagattttgtggtttataggttatgactcccctggcccttaggaaggaatttgggcaagattgcatataatctatgcatttctttctttttctttctctttctttctttctttttttttttttttttttttttttttaataaaaaaaggaatcctggcaagagaaaaaaaagtcaggcacagtggctcacacctgtaatcccagcactttaggaggtaggaggatcacttgagcccaggagtttgagaccagactgggcaacatgtgagacctcatctctataaaaaaattaaaaattagctgggcggggtgacacatccctgtagtcccagccactcaagatgctaaggtgggaggatcacttgagcctagaaggtcgaggctgcagtgggccgtgatcatgccattgcactccagcctgggtgacagagtgagatctgtctaaaaaagaaaaaaagaaagctcagagttcagtcttctacttagcataaaaatacataatttgcttctttgggtcttgatttctgaaggctccaatgtcacgtaaaactttggttagatgaatttgtgttgcttttctcttgttactctctctcttgttctaggggtatcagccatgacctctgcaatgggtgaggaaaaggtaagactttttctcccctacagagactctcttgcacaggggacgtggtctcttttgggaaagtgggccggggcagtagaacagtattatcctcataaaggcagctttagtttagaagcctactgtacaaaaatcagtgacattgcctgtgtaggggagaaagagctgttttctaacccattgctaggtttatggctgaggtcgctattgcaaaagacagattaccaacaacaaaaaaagcacagaaatttatttaatgtaagtaacacaggagctttcagaaatgaagatctgaagaaacaggaagaagtgggtatttttgtggacagtcgtgcagaagtgtgattgcaggacaaaactgtatgatctaatggaaataaactgagggaaacttggcaaggcctgttccaattcttctctgggtccctgtgtcttcagagacagggacattcctttcctctgggtatagggtgggcgcctgtctcacaaggatcctgtgacttactttagagaaaggtcagaggattcttttaagacctgcttcagagaaggacaggaaaaggtgagagggaccttcctgcttctgctgttttctcaaatgacaaggtgccatagtttgggatagcgtgtcctaaaccctgtcacctgaaaccaaaatagagatctgagaattgaggactgagtatgaacatggaaaatcattctggtattaacgtaagccattcttattgctagaagccctaagaatctctttttcagaaaaggaattggtaaagtcagttcatgtaaggcacaaccttacataaggtaaagtcagttcacgtaaggcgcaaacttacatgaggtaaagtaagttcatgtaagattgtgcctcaagtaatttcctcagataagttccttactgtgctactttttatttattctaataactttcttttgctaacttaaaaataatatctggccaggcatggtggctcacgcctgtaatcccagcactttgggaggccgaggcaggcagatcacgaagtcaggagatcaagaccatcctggccaacatggtgaaaccctgtctctactaaaaatacaaaaacaagtcgtgcatggcggcgtgtgcctgtagtcccagctactcgggaggctgaggcaggagaatcgcttgaacccgggaggcggaagttgcggtgagccgagaccacaccattgcactccagcctgggcaacagagtgagactctgtctcaaaataataataataataataatatcaatttatcataaaaggaaaagttggaaaattcagaaaaatataaggaaggaaatctaaatcacccataatctcactctttaacaataatcactattgatattttaggcaacttttattccacagattattctgtttcttaactgaaatttgatgatgattatactctactggtggctgcatgagtgaggagcagagacagaaacacaacttctttgcccaggtgtagaagtgtctcagccacagcctggcagctattgtgggagaaaagtattaataccttgtggcatcattcttccattcccttccagcctccctcagcccaccaagggcagtctctgaccatccaggaccaggtgtggttagaaggaaagttatacagtaatcacctttatggtccccagcatgggctaatgtgttaaaggaaggtctacccatgacttcggtgccctggatcctctcaccagccagtgtgggcgtgtgtgattagtcagtgtattgatgcatgaaaggcaaccttagaggccaggcatggtggctcacacctgtaatcccaacactttgggaggcagagcaggaggatcacttgaaatctggaattcaagaccagcctggaaaacatagtgagatcccagtttctgcaaaaatcaaacaattagctgggtgtgatggcatgcacttgtggtcccagctactcaagaggctgaggtgggaggatcatttgagctcaggagttcaaggctgcagtgagctatgatccactgcactccagcctgggcaacagagcaataccttgtctcaaaaaaaaaaaaaaaagaaaaaaatactatctcagaatcccactggtttgcagaaacagacatttcctctctccagggtctgcaggctccctgtccttagctccagagtatgacttagacttagatttaggtaggtccatgtcttttttttttttttttttttttttgagatggagttttgctcctgtggcccaggctggagtgcaatggcacgatctcggctcactgcaacctctgcctcccgggttcaagcgattctgctgcctcagcctcccaagtagctgagattacaggcatgtgccaccaggcccggctaattttgtatatttagtagagatggggtttcaccatcttggccaggctggtctcgaactcctgacctcaggtgatccaacagccttggcctctcaaaatgctgggattacaaacatgagccgctgcgcctggccccacgcctctcttattgtccctggatagcacagaactctgacatattcttcccacggtcaatgggaagagtacaggcaaatgacagaaacacactctgcacctcaagctctctgcttagaatccatgcatcgtcccatctgccacattcttttggtcaaagcaagtcacatggccaaacccaacgtaagtgaagcaaggaaataagcttcacccattctgggggaagttactgcccagtcacctgacagcgagcagagaactgggagcgatggtctgatcttcactcagtgaactgcattaaccccatagctctagcctgactggctgctcactagtgctccaaagacacctctgtgcctttgtgcatgcttgttctcctccctggaaatctattcttattctttttttccctaccagaacattgaacagctttcaaggcctcgttcaaactttgaccccctctgtaaagtttttcttgaccatcgcagtccatagtaatttcttccttcctgaaaatctctagactgtggctcattttgaatttttgtagtctcttatatcttccccattgacagatatagagtcatctgtccatctcactatgatcgatctgtatttatcttctccatgtgatagcaaccttcttaagaacagggatttgaggccaggcatggtggctcacgcctgtaatcccagcactttgggaggccgaggcaggtgaatcccttgaactcaggagtttcaaaccagcctgggcaacatagcaagaccccatctctacaaaaaatttaaaaattagctgaccatggtggcatgtgcctgtagccccagctacttgcaaggctgaggtgggagaattgcttgaacctgggaggcggaggttgcagtgaaccatgatcacgccactgcactccagcataggtgacagagtgagatatgtccctccccaaagaaagaacagggatgttttacatgtataaagggtactcacaaatatttcttcacgaactgataactgtttgcttgatttactctttattccaagaagatttttaaaaagtatttgctgtttctttcctatccagctgtccccaaatgttgcactcccagaagctgtgagaaaagagagcaagctatgaccaagagtctcatttcccattttaaagttcctttattattcgactcaggtttacccagtttccatttgcaggatataatgactaaacgttgagttctgctcactacttctacagaacagcccgcattgagtgggcgcccacaccgcaggtggaagttccgatccgaaagcaatcagtcttattattctaagaattattcttattctaaggactgccctcctccagcacagatttgctttgtgttttttgctatttcattaaaagaaaaaacaaaaacagtgtagcatggtcacttagaaggatattctgaagctgaaaaagtcagaagtatgtcagagaaagttctcagagaaaggtacagctatacatcctgcctctttagggcaccctggtgaaatgtggcccttcacagtttagacaggttcttccctgcagagggtgacagatgctctgtctttcccagataaggatgatgacaaacacttgctctggagtctttttttttcttttaatctttcctttttcctgagatggagtcttgctttgtcacccaagctggagtgcggtgggatgatctcagctcactgtaacctccacttcccagtctcaagtgattcttctgcctcagcctccctagtagctgggattacaggtgcccaccaccaaacccaattaatttttgtatttttagtagagacagggttttgccatgttagccaggctggtctcgaactgctgacctcaggtgattcacccaccttggccacccaaagtactgggattacaggcgtgagccaccgcacccgggtttggagtcttcattatgctctctgttcatgcttccagttcatcatacgtgattcaaatatctggccttcctaagccaaggtttgctttctagcagcaccttgaaatcactcttgtatgaatgggcgaactcatattgggtcacatcttttgttattgtggaaaaatatatgtaacataggacttatcatcttaaccatttttaagtgtacccttctgtggtattaagtacattcaccttgctgtgctagattctcccctatggtacttaaagcttttttttctttttcttttctttttttttttttttgagacgaggcccccactgtgtgacccaggctggactcaaacacctgggctcaagtgatcttcctgcctcagcctctggagtagctgggactacaggtgcatgccattatgcccggctctgtacttaagagtattttaatgctgagaaaaattatttaataacttggccaggtatggtggctcacgcatgtaatcgcagcactttgggaggccgaggcgggcagatcacaaggtcaggagatcgagaccatcctggccaacatggtgaaaccccgtctctactaaaaatacaaaaattagctgagcgtggtagtgcgtgcctgtaatcccagctactcgggaggctgaggcaggagaattgcttgaacccaggagttggaggttgcagtgagccgagatcgcgctactgcactccaccctggcgacagagcaagactctgtctcaaaaaaaaaaaaattatttaataactcaacgttctgccactaatcggccttgggaaaatcacttaatcctctgtgtcctcatctgtaaagtagcaatagcaatggtacctatgttacggggttcttgtgaggatgaaataaaatcgtatctgtaaagccttagcataggtttccagcaggtagaatatgttacctaatatggctagtcgtggtcttcaagcaaaacatttaagatttaaatagttttctgaattctatattgtaattgcactaattcacaatataacatcctttcaaataacaaataaaagtttaaaagtcttggaaaaacatattaaaataaacttcttttcaataagaattaccaaaagaattgtacttggccaggcgtggtggtttatgcctgtaatcctagcactttgggaggctgaggggggcagtttgagaccagcctggccaacattaaaaaaccccatttctactaaaaatacaaaaagttagctgggcatggtggtgcacacctgtaatcccagctacttgggaggatgaggaaggagaatcccttgaacccaggaggcagaggtttcagtgagccaagattgcaccacagcactccagcctgggtgacagagcaagacgctgtctcaaaaaaacaaaaaaaattgtgcttgacttatttcctctatttaagttagcagccaggcgcggtggctcatgcctgtaatcccagcactttgggagtccgaggcaggcggatcacgaggtcaggagatcgagaccatcctggctaacatggtgaaaccccatctctactaaaaatacaaaaaattagccgggcgcgatggcgggcgcctgtagtcccagctactcgggaggctgaggcaggagaatggcatgaacctgagaggcggagcttgcagtgaaccgagatggcgccactggactccagcctgggtgacagagcgagaccccgtctcaaaaaaaaaaaaagttagcaaatcaccttttttatgcattgtatttcaaggagatattttaaacttctacattttatttgtctgcagtttttttcctttctgtccagtacacttgattctcaaacttcagcatgaccaggcatggtgcacatgcctatagtcccagctatttagaaggctgagcaggggagattgcttgagcccaggagttcaaggctgcagtgagctatgatcatgtgactgcactccagcttgggtaacagagcaagaccttgtctctaaagaaaagccaacgataagaaaaacccaaacttcagtgtgcataaaaatcatctggaaagcatattggaatgcagatttccaggcctcatcccagagattccagtgtagcccaggaacatgcattgtatcaagtttcaaggtggtctgaggattatacttggagaaacactcctatggtgtaaacacttgtgcctagattcagtagggtccttaatttagtcacagtgcttctgagatacattttctgcctttaatacatttgttatgtattattttgtaaaactccgtgtttttacataaaatcctcagcactctatgacagtggtcactcattatattcacggtgcatatggatacctcagctgcacttattgtgtaaaattagtccttgagtgctcgtgattttttggaaccctttatttttagccatcctgttgatactcagtattaacaaagtatgatccagaaattaatacaaaccatgcttagagaccatgagtccacttgtgagttcttttatttctttatttttttattttattttattttttgagacaaggtctcactctgttgcccaggctggagtgcagtggagtgatcatagcttactgcagcctcaaactcctgggctcaagcagtcctctagcctcagcctctcaagtagatgagactacaagcatgcatgccgccatgcctagctaattttttcattattatttttagtagagacagggtcctactatgttgcccaggctggtctcagactccagggttcaaacaatcctcctgcctcagcctcccagagtggtgggattatgggcatgagcctcacccagactgtgagtgcttagatcatagtcctccctgtctttgtttaggctggttttctttccagaaatgccctttctgcttctttctgtccttggaagttgctaaatagtaaaccttgtgttgtgattgacccaggcagttcttttaaaaaataaaagaggccgctaacatttgcaaacatctacatttctggattctcttgataagccagaatcccgccagcctacaaggccttgagctcccatgtggcatctgcctgccggagcagttcccctcttgagcataggacatgagcttgaccttcactccagcctccagctcttgccagtgccttggggacttccagcttccagcatttaacatgcatggtccatgcatggacttcaacaattaaatgatgtatttttcgctactgttttctatcttctgttttttcattgattgtgtacactatgggaggatgaagaggtttcactcctgccttggcaatgtggtatcagcatttgggaaggctctgatggttgactgatatcatatgctctggttccctgtttgtttcacacacttaacatcttctttccagcaagactgtgagttccttgcagagtctagtacggtaatgaacacttactgatctgatcttttaacattttatttagaatttctacttggataacagaggaaaaaaagaaagcaaggaaactaatgagaaaatgaatgctaagaacaaggaatccttacttgaggtaaggttaattttgcagagtggaagaaaagagaaggacgtttgctctatttttaagtcatttgcttccgagaacaatggaaaaatctaaagacatacactgaaattttaagttggggtgttaaaatcaaattatttctaaattatagctatttagataattcaactgtttttcttttttgagtcatttgttacaacatgtggctttagataaatgaagctggatttgtaattcttgacttttaaaaacttctagcattccaagtttccattacttaagtgctccacggaagtcagacgtaaaaatttccaaatcttttttaaaagggacctctaagatgctctctcaacattttagacgtggtaggaagcgtgagatttggagtcagggacccgttacaggaggcggctctgcctagcactcttcatgtgctcatgggacagtccccgcccccccgagaacctgacagattccgaattgtattgaattatcacagagattcagggagatggggaaagcactgtgttgattaccatacagatgtctatgatgaccactactggggcgtgttccagaagttcatttgacaattgattttttggaaacctctaatgagttttcacatagtatctatgttaaaaatcaaggctctgagcctcgcatgggggcacacacctgtaatcccagctactcaggaagctgaggtgggaggatcacttgagtccaggagctcaaggccagcctgggcaacaaagcaagatccagtctcaaaaaaaaaaaaaaaaaaaaaaaaaatcgaggatctgttcgcagcacataacgcagttgaaatgagtgccagatctcaaatcacaaatggtcatgctagaactgcccaggttgtatttccctgagacaatccatggaccttttcctgagttagtaaatttcctgagttagtaaattttggacctcccttgaaaaatcagaagacctggtgatgccctcggcatccggttcccacctggagccaattggctcatgctggagccaattagctcatgctgaagagcgccctctctcgttcattaaggttccgcccaggccttgcgcatgtctgttccctgcctgcttttcacagcccggtgccaaataaagcagctaccagaaccagctgccaccccccagatgctgagctcaggtgttgcaggttctggtgcctgggagcatgagcacagtgagcatttcccagggaggcccaacaggatagtccttgttccaggaattcagcgatgttttacagctggatgtaaaagaaaattcaaagcatgctatgctatgaacaatcgttatcctgctgtctaattggggtcaaaactctgaatttaagagattattaacaggatgactaatactagccaaatttggggagaaattggggagtgtaaacagaaatattttccagctctactacataaaaatgtacttggaggatgcaaaatccagtttgttttgcatttatggaactaaatgagaggatgttgagagttataaaaagaaagcaaaaaataagtttgactatttgaattgtaaaatagaataatatataattttattctattgatttttaaaacaaaatttattaagaattctataatcctatgcaagttttgagatttaaaaatctacaactagaagatgtgctttgttattcttttctaatactgatgtatttataactgccttcttccttctttgaaaagaaaactatcccaataataaaatattaacttatttatttttatcctttttatttttactttttgtgggtacatagtatgtatacatttatagggtacatgatatattttgatatgggcatgcaatgtgacctagtcgcatcagggagaattgggtatccatcctctcaagcatttgtcctttgtattacaaacaatccaattacactcttttagttatttttaaatgtacgattaagttattattgactatagtcaccctgctttgctttcaaatagtaggtcttattcattctttctatttttttgtacccattaactattctccccaattttatgtgtagaattatatataataattgttctatttaccagcaatgaaatggtaacttttttacttatcaggaaagtaataattattctgtcttccattttataataacattaattgcttttattaaaggcttacttttacaatatgccgagactgtactgacaacctaccttatgaagttgggctattattattccattttaacaagtaagtggactgaggtttaatggcccacggtcacagagttaagtggtgaagaggccttgaggtctaactcaggagccaggattcttgatcgatgtgttattcttcctctcttctggcaaatagcatataatataaacatatgcattcgatcagagttgtacacaaaattgacttttagtttaaaagctaatttgtaagtttttaaatgtgaataaaaatgcgtgctttatctttcgtgtgtgtcttatgtcgtcggaatctcactttcaggaaagtttctgtggaacatctatcattgtaccagaactggaaggagctctttatttgaaagaagatggaaagaaatcctggaaaaggcgctattttcttttacgggcttctggaatttattatgtacccaaaggaaagactaaggtcagaaaaaaaaaaaaaaaagcacttagcaataaagcatttcatgagaatgaaactaaagaaatccttagttggcaagttaaatacattctctgttgctgcagattccataatcctgcaacatgtatacaaataggacagtattattgaaatctttttgagttttcccgtagctctcttgaaggtaaaagtattttatctattttaaagtcaggtttcaaaaatgatggcaaaagcacttttctagagattattttgttactttacccgtctatttccaatgactttttacccctgttgttctattgtcattatagttaaatttcttttatctggaatcatagaggtattggaaatcttgataagattttctttcttttttttttttttcttttgagatagtctcactctaatccacaggctggggtacagtggcatgatctggactaactgcaacctccacctcccaggctcaagccatcctcccacctcagcccaccccccaccccccgccaagtagctgggactacaggtgcatgccaccatgcccagctgatgtttcatattttttgtagagacggggtttcaccatgttgcttaggctggtcttgaactcctgagctcaagcaatctgcccgcctcactcagccttccaaagtgctgggattacaggcatgagtcaccgcacccagctcttgactagattttccttgagattttagcccttagactctgaatattttaaaatcattctctgaggtgtactctgaatttcccttcctaatttaacagggtattttagacaacatttaacttttacttggtgattcaggattattgcctcaaatttataagtatgtaataaattattccttgaaatgtaattttaactcttattctgaccatcagctctctctaagacctttcttagagggttaggacctttccgtcttttgttcaccattaatacatgtctaatctgtatcttgggtacgcggaagcattttgccttcccttccaaatgcagggcaccaccaatggtatattcatgcattgcaatgcatgaatttacctctgataaagcttaacccacacttccaagccgatgaaattatggtgaacatccaggtctgctacctccagtaaggagactcttgtctctatcggaagacaggaggggcattatggctaactcttggtccaggacagctactgttctccttagcctcttccactcttttcctgcccttagatctgatgctttcccatctctgccatctcattccagtcccacactgggcacctcacaactgacccacaaataatttgttttcgaaatgtttatgtcttaggcatttgaatataaacggtgcatataaataaacatataacaaacaatatactctgtgatgagaattaaaagtgtttacatttggctgggtgtggtggttcatgcctgtaatcccagcactttgggaggctgaggcaaggtgaatcacttgagaccaggagttctagaccagcctggccaacatggtgaaacgctacctctactaaaaatacaaaaattagctgggtgtggtggtgcacacttgtaatcccagtagctggggagggtgaggcacgggaatcacttgaacttgggaggtggaggttgcagtggcctgagatcatgccgctgcactccagcctgggtgaaagagcaagactaggtctcaaaaaaaaaaaaaaaaaaaagtgtttacagtagagttggacaagaataccttctctcactgttaccattaacacggggttgaggaactaactagtatattaaagaaaagaataataagtataaccaatagaaaagaagaggcaaagactgatttttcacagtgttgtctatccagcaatatgagacactcaactgaaaaactgttagaaccaaataaatgtattaactaagaaagtttttctttacacaaacaatatatataatgcaaaccataatgcaaaagaatccatgcagactagaaacagaaaatgcaaaatacctaacaataaactcagcaagaaatgttccagattcatatggcataaaatataaaatgtattaaaagaaatgaagtagaactgaatcaatagaaaggtaccatgttgcaggccaggtgcggtggctcatgcctgtaatcccagcactttgggaggccgaggcgggcgaatcacgaggtcaggagtttgagaccagcctgtccaacatggtgaaaccccatctctactaaaaatgcaaaaattagccaggcgtggtggcgggcgcctgtaatcccagctactcgggaggctgaggcagaagaattgcttgaacccaggaggcggaggttgcagtgagccaagatcatgccactgcactccagcctggggcgacaaagtgagattccatctcaaaaaaaaaaaaaaaagtagaagataaagaaaagaaaggtaccatgttgctaaaagaaaagttattaattcttcccagttttctataaatttaatataattttaataaaaatatcagtaggattttatttacttgaaattcacagactgatttcatggaaaaaagacactgttccaaaatagaccttcccaaaattgtgaagaacatcaaggtagatctcctgctgtgccaaaacattagataaaaacagcacagctagagacaaacaggtcgacagacaaccgtctaatatcagagaagttaaagttggaatttatatcacagcagtggggaaagaatgtggtattcaacaaatagaactgaaataactgtatatccatttagaaatataatttcctacctcattccatgtaccaaactaaattcttgattgattaaaatatctttagagaaaaatagtataaaatcctagaagaaaacagaggctggctgggtgcggtggctcatgcctctaattccagaactctgggaggaccaggtgggaggatagcttgagcccaagagttcaagaccagcctgagaaacatagggagaccctgtctgtacaaaaggaataaaaaaattagtggggatggtggcacatgcctgtagtcccagctacttgggaggctgatccgggaggatcatttgagcccgggaggtcaagacttcagtgagccatgttcgtgccactgcactccagctgaagtgacaatatgagatcctgaaaaaaaaaaaaagaaggaaagaaagagagagagtgaaggaaggaagaaaggaagaaaggaagaaagggaggaagggagggaaggaaggaaggaagaaagggagaaaaaaaagaaaatataggttaatgtttttataattttgagctggagaaaggtttcctaagcaagaataaaaactcaaaattataacggagaaaaatggccagatttgacctgataaagttatttttaataccttatggccaaagataacaaacaagaagtgaaagactgactacagtgagagagtacatttgcaacatgtataaacaagtatgaatatccataaaatataaagacttcaagaaatcaataagaaaaagataaacatacagaaaaatggcaaagcttttaaagggaaaatttacagaaaaagaagtaccggtaaccaccgcataactaaaagttgctccgtctcattactgatcagggaaatgaaaattaagcatgagattgataaaataaacaatatagataatatccaaattttggtggaagtgggtaagaaaaagagacactcacgcctgggagcttggaatagaaactcatacggccaaactgggggacaatttagcaaaatctatgtacatgtaacagggagtaaaaatcctttcaaatggcaactccatgcttgacgaatctatctcacaaaaatataagctcacatgcacagtattttttgtaatagctaaatattgaaataacttctaatcatctgtagtagaatagttaaataaatcgttacacctgtaccgtagaattctctgcagccataaaatgaatgtcatatattaattcatgtcttgatgtagaaagactcctagatgcaatgttaagaaaaagaaggcgaggggcggtggctcactcctctaatcccaacagtttggaaggccaaggaaggcggatcgcttgagctcaggaattcaagaccagcctgggcaacgtcatgggatagaacagaatagaatactaccaaactattaactatggtacctttggagaaaagaacaaaataagaaaaaggggtggtggaggaagatgtgcattttattatttatatatatatatattttaaatgtgactaatatgcattcgtttgtaacttaaaaatgtaaactttgaacatccagaagaaaatatcttgtaagaaaagaatacaagcatatgtaaagaaataattgtgcactaaggtgtaaatagttctgccatctattctttattcactaactagtaaagaaatatagaaagcgaaacaaaaaactaatggaacacatttgtaattgaagtgtaaccaaatatgtagattacaggctgcagtcttcacagtgcctgttatccgtggaggagaggtctctgtttccatggcaacactgcctgcagtaaagagaacttgtgaaagaaatcctttttctcaggaggaagtgcatgaagtgtgtgctgatttactgagcataagtttatctctcatttttcgtcctgagggggacttttttttttttttaatgctcaatcgcaaaatccatcacggacttagaatggcaaaagtcaaaatgaaatttctggctaagcggtcaccttgtctcgactgcatcaataatgacatctcaaggacagtccatcctgactctgggagtccccagacaggcattagaacagcagtataatctttcactccgtttctgggtcagtggcaccgattttcatggctgcactctttttaaaaaattaattttattttttgattgacaaataataattgtacatatgcataacgtacatagtgatgttttgatacatataatgtatggtgatcagatcaaggtaattagcacatccatcatctcaaacatttatcatttctttgtgttgggaacattcaatatctttcatattgggaaagatttatgtatagatcttactaaattgtcccccaacttggccatatcagtttccattccaacctttcagacttgcctttgagaaaacctatacatggcagatgtttatataaattacctaaaagtcaatattttctttactaaaatataatccttagttgtgctatgaaggacaactctggaaaattgttaactgtcatctcagttgaagttttatttttttccctgtctttcagacatctcgagatctggcgtgttttatacagtttgaaaatgtcaacatttactatgggactcagcataaaatgaaatataaagcgcccactgactattgctttgttttaaaggtatgttataagaagtcattcatttagatttataagcaatttgagttaattttttttcaaggaagaaaatgttaaattatagttagccatatgtgtaacaataagaaattgtttaaccaaaataggaatgagggaaacatttctatcaatttgggacattttccccaaagcctcctatctgaacctaaaactttaaggtaactctgtctggggatttcttcacttctgaaaatgaaagttccacattttaaacaaattaatttataatgttatcgataagactaaaaaaagttttcagttcttattgggctcattccaccataagaagattttagaaattagaaacttgcaagatttcctagacaacttatagaaaatagccaaaaaaaagttgttttaattactgggtcatgaaacttcaggtgtatattgtcaaaaggcaataggtattatcaaatgttagatatggtttacatttttttgagaccgagtctcactctgtcacccagggtggagtgcagtggctcaatcatagcccactgcagcctcagccccccaggctcaagcaatcctcctgccttagcctctcaagtatctgggactagaggtgtgcaccaccacaccagctaatttttgtatttttagttaagatagggctttaccatattacccaggctggtctcaaactcctgggctcaggcaatccacctaccttggcatcccaaagtgctggggttgcaggcatcagccaccactcctggccgatttacattttttaaaattagaatctcagatcagtctgatcaggagatgggttattacaaccacacatgtgatgcgttacgggtctttctgtatgcctgcagaactctggattaaggactatggtaagtttttgtctgcgtttctttttagtcaaatgcaataaccaggtgaattcaatcatatttagtaattttgactccctgaacaattacaatcacttattataatcatcaaataataattggttgaaattcttggctttatcaaggactcaggatattcagtgactttcattcagatgtcctagccttttttttttaattcctaagcatccacttttaattatttacagataatattaataataaaaaccactatactagctcagtcagcctgatactcccccagtggttctcaaccaggcattttgcctccaagggtcatttggcgaaccctaaaaacatttttgattgtcatagcttggggcatggagcagggactactgacatctagtaggccaggtatgctgctaaataccttgcagtgcacaagaaaacccccacaccaaagacttctctggcccccaatgtcaacagtgctgctgtcaagaaacctgccctagacagaagagccccagaataatgactgtgaaagcactgaaggccgggagaaggctggatccgttcactcactcattcattcagtcatttaatgtttgttgaatgacggccgggcacggtggctcacacctgtagtcccaacactgtgggaggctgaggcaggcaggtcacttgaggccaaggactctagaccgtactggccaacatggtgaaaccctgtctctgctaaaaatacaaacagtagctgggcgtggtggtgcacgcctttagtcccgctacttggggggcttgaggcaggagaatcacttgaacccgggaggcggaggttgcagtgagccgagatcgcaccactgcactccagcctgggcgacagagagagactctgtctcaaaaaaaaaaaaagaaaagaaaaagaaaaaaaatgtgttgaatgacaactattgttgagtgacaaggattattattatcattattattttcactgccgcattcccatcacctggaatagtggtgggaatgcggcaattaaaaaaatacaacaatccctgtcctcatggagtttacattcaacatgaggaaaatggcaaagaacaaaaaaatatgcaatgtgatgtcaagtagtaacaaggagcaatatgaggtagggctggggccagggctcctttggatggggtgttcacagagaggctctctaggaagtgacatttgacaaaagatgtgaatgaggtgagggagcaagaattatctgcagtacgagccctccaggaataagaacaggaattggaaagccctgaggtgagggaggtctgtttgttccgaaggaagagagatggggagcatgccctgcctgattctgctcctcgcccctccttgtctgttcctgatataggaaaaataagaataatggcaagcacttatatggcattttctttgtagatgtggtatgtgtgcagagagactccccagccaggaagtggccaagtcagaatgagaactcaggcagtgcggctcagaggccgttctctcagacagtttctcaggcccccagagatctggacacaaagcatcgcccactaccctgtccctcccacaatgccacctgcccttgagtcacatcttcccatgtctggaatcctaagaccctgataaattaccaaaatggagcattccaacacactttattgccaaagacttgtccacacttcttaaatcaggagaaggttttggagaaattttctgaaacactggtcagtaaactggctgaatcagtcactggagactctttacaaatgcaggttcccaggccctaggcccactaaatcaaaataatgatggaacctagggttagggttagggtttaaggatggagcctaggaatcttcatttttcctaagcatggtcaagttttctactgagtgttagaactcactctaaccatcagtactcatggcttagctggtgattaaatggccttcagagtgggcagacaggatgaaagtctagcagaaggaagcaggagccaaaccccagggctggggtccagaagccagagcaggggtgtctgtcaagaaaaagacaaggtctctgacaagaggttcccagcatggggatttagacacagtgaacaggggagggactcagtttctcaaactgacacataagtttgggactaggacctacaattggcaggacttgaacggtctgacctagaacatgaggttatcctgagattacaccaagaatagaaatcctaagtcccagagtattgaaccagaatttctaaaacttcctgctatccaaggtctaggtctacaagagagagttgaggatctccccaaaggagagagggggctcagaggtggagaaaccagcaggactgatggatctgggagcaagagtcatgagcaacccttgcagaatgtgtatttccttttctctcaggatgatgatctgttctgttctaaagccaatttcctcatgtgcaatcaccctgctcattttgttcttaagcatgcttctcagttccctcccaaaatattgagaattcttattaatttgctgagtaaaaggataactgttgaggtttggagaacctaatttgtttatgaacattgtggtcacttatttccctttttgtctgctgttttaaaaaaataaaaactcttgctattctttattagggtgagccaatttccaaaatgcaaagaatgagtgtgtagattgcaagagggattaaggatacagggaggcatgttaacagacttaggccaggtgcggtggcacgtgcttgtaatcccagcactttgggaggccaaggcggatggatcacctgaggtcagaagtttgagaccaccctggccaaaatggtgaaactccatctgtactaaaaatacaaaaattaggccgggcgcggtggctcacgcctgtaatcccagcactttgggaggccgaggcgggcggatcacgaggtcaggagatcgagaccatcctggctaacacggtgaaaccccgtctctactaaaaatacaaaaaattagccgggcgtggtagcgggcgcctgtagtcccagctactcgagaggctgaggcaggagaatggcgtgaacccgggaggcggagcttgcagtgagccgagatcgcgccactgcactccagcctgggcgacagagcgagactccgtctcaaaaaaaaaaaaaacaaacaaacaaaaaaaaacacaaaaattagctgggcgtggtggcacgcgcctgtaatcctagctactcaggaggctgaggtacgagaatcgcttgaaccccgggaggtggaggttgcagtgagccaagatcacgccactgcactccagcctgggcgacggagtgagactttgtctcaaagaaaaaaaaaaaagattgcatgatttcatggcctgataaggccaggctaaagtttattcttcaatatgagcttgatgactatggctgttcatgaaaggtcctgtcagaaagattggcgtctgagtcctggccctgtcacctagtaactgggtcactaataagatgctaagcctcactgcacatcttcaagagatgagagcgtccagcccttcttttgataattaaatatgatatgcctacaaaatcattagtgcaatgtctagaaacatatcagcacttagtaagtggtagttattattgccctctggtattaaataaatctatttattaaccagtggttctcaaactttagtatgcatcagaaccatttagattgttaagacacacattgctaggcccccagggtttttgatttagtaagtctgggattgggcccagaaatttgcttttattttttgcctttgtatttattcatttattttttaattaacccatagtaattgtacattatgacacacaatgtgatgttttgatatatgtaaacattgtgtaatcatcaaatcatggtaattagcacaaacgtttatcataaaatcctctcttctagctgtttgaaatatacaatgcattattgttagctatagtcaccctaccttgcagtagtgtaccagaacttattcttcctaactataacactgtactcattgacaagcctctctccccattctctccggtctctagtaaccactattctactctcaactcctatgaaatcattttcttttagattccacatatgagtggaatctaaatatttttgtattttctttacctattcatccactgatgggcatttaggttgattctatattttagctattgtgaacagtgctgcaataaacatgagagggcaggtgtctctttgacatattgatttcatttcctttgtatatatacccaacagtggaaatactggatcatatggtagatgtattttcagttttttgaggcacctccatactgttttctgtaatggctagactaatttacatttctgccaatggtgcataagagttcttgtttttccacatccttgtcagcatttgctattttttgtccttttatcatagccattctaattgggatgatgcaaaatctcattgtagttttgatttgcatttccttggtggttagtgatgttaagcattttttaaattcctattggccctgtgtatgtcttctgtggtgaaatatctattcacgtcttttgtccattttttaaaaattggattatttgggttttttgctagtgagttatatgagttccttatatattcttcttattaacccttagtcaaatgtataatttgcaaatattttttctcattctgtaggttgtctctttactctgttgattgttttccttgctaggcagattcaccgttttgggtctttctttttgttggtttgtttgtttgttttgctttgttttgttttgtttttttgagacacagtttcgctcttgttgaccaagctggagtgcaatggcatgatctcagctcactgcaacctccgcctctcgggttcaagcaattctcctgcctcagcctcccgagtagctgggattacaggaacgcgccaccactcccagctaatttttttgtattttttagtagtgatggggtttcaccatgttagccaggctggtctcgaacccctgacttcaggtgattcgcctacctcggcctctcaaagtgctgggattacaggcatgagccactgcgcccggccagttttgggtcatatattaactaatctattttgggtcgatttttgtttatggtgagaaataggggtcaagttacacgctttgcatgtagatatccagttaacccaacactgtttattgaagacactatctttccctcaatgtgacttttttggtttgtttttcttcttctttttcttttgtgggggacacctttgttgaaaatcagttggctctaaatgcattgatttatttctggactctctatcttgttccattggtctatgtgtctgtttttatgccaataccacactgctatagatttgtagtatattttgaaatcagtttgtgactcctccagctttgttctttttgctcaaggttgctttggctatttggagtctgtgtttccacataaatttgaggattgcttttttctatttctgtgtgaagtatgacattaaaatttttttttattattatacttcaagttttagggtacatgtgcacaacgtgcaggttagttacatatgtatacatgtgccatgttggtgtgctgcacccattaactcgtcatttaacattaggtatgtctcctaatgctatccctcccccctcccccgaccccacaacaggccccggtgtgtgatgttccccttcctgtgtccatgtgttctcattgttcaagggattgctttgaatctgtaaattacttttggtagcatggacattataacaatattaattcttccaatttatgaacacgggatatctttccatttatatcctcttcaccttcttttatcactgttttatagttttcgtcatagagctctttctcctccttggttaaatttatttctaggtattttatttttgtgtaggtattgtaatgggattgctttcttgattttcagatagttggctactgttgcatagaaatgctactaatttttgtatgccgattttctatcgtgaaactttactgcatttgtttattagttctaacagtttttttggtggagtctttgagattttctacatatgagatcatgttgtctgcaaacagagaccatttgacttcctcctttccaatttggatgccttttctttctttctcttgcctagttggtctcgctaagagttccagtactatgcagaatagtagcagtgaaagtgggcatccttatcttgtttgagatcttagggaaaaagcttctaattttttcccattcagggtgatgttggctgtgggtttaacatatataaactttattacgttgaagtatgtttcttctatacctaatttgttgagatgctgaatttttgtcaaatgctttttctgcatctgttgaaataagcatttggtttttaatctttattctgttaatgtgatgtgtcacatttattgatttgtatatgctaaactatccttgtattgctgggatgaatcccacttgatcatgatgaatggtcttttaaatatgctatttaatttggattgctagtatttttttgaggacttttgtatctatgttcatcagggatgttggcctgaaggttttcttttttgttgtgtccatgtttggttttggaattgggataatgtaggcctcatagaatgagtttggaagagtttcctccttttcaattttctgaaatagtttgtgaagaattagtctttatatgtttctagaactcagcagtgaagccatcaggtcctgggcttttctttgataagagactttttattacagcttcaatttcattactcattgttggtctttttaggttttctgtttcttcctgtttcaatcatggtaggttatatgcatctaggattttagtcatgttttcctaggttttccattttgctagtgtgtaattatttatagtagtttttatgatcttttgtatttctgtagtatcagttgtaatgtctttcttttcatctttcattttatttctttcagtcatctttctttttttcttagactagctaaaggtttctcaattttattttttcaaaaaacttactctttgttttattaatatttgtgttttagcctcttttagccttaatatttctttttcaaatgaatgaaattaatctctatttcatttatttgtgctctgatctttattatttcttttctcctactaatttggggtttagtttgttcttattttttctagttccttgagatgcatcattagattgtttatttgagagctttctttggctgaaaaagtctttatctccttcatttctgaagaatagcttttctgggtacagtattcttggttttttttttaatcttttttttaatctttcatcactctgaatatattgtcccactctttcttggcctgcaaggtttctgctaagtctgctgccaggcatattagaattcccttatgtgttatttgctttttttttcttgctgctttcaggtgcatcgctttgtctttgacctttgagaatttgattatgatatatattggagtattcttatttgggttgaatctgattggtgacctttgaccttcctgtgcctggatatttgtatctttcttctgatttggaagcttttctattattatttatttgaataagctttctatcccttttcattctttactctctctttaaagttagttacatgtagatttgctcttttgatgatgtcccatgggtcatgtaattttttctttattccttttcatttttttccttttttctcctttgactatgtattttcaaatagcctgccttcaagctgactgattattctgcttgatcaattctgcagttgatgtcctctgtttcatttttcattttgtttgttatacttttcagctctaggatttgtttgtttttttaattatttctatttatctgatgaatgcttctgataaatttctgaattgcttctctgtgttttcttgaagtttgctgagttttgttataacagctatttttgaattctttgtctgccagatagctggcacctctttttgtccatttagtgagaccatgttttctaggctattcttactccttgtagacattgggctctgtctttgcattgttgagttaggtatttatttcagtcttccctgtctggatttgtttatgaccgttcttttttagtgggcgtatgcagaaattgtgagcagattgacttttgtatgtcatttcagcactagagggcctcctaagtccaggttagacccgaatcctacactaactctgccgaggatacactgttcaaactgcatgggccctgggagacccacagagggcccactggatggtgtgggaaagccggtcaggctctcaggtccagaggttctgtggaccatgcctcccacagcacagcataaacagcccatctggtgtatcatcacatctggcagggaaggtgagccactgccaaatttgtccacctggctgctgctagccccactccctctctttgtcccttgctggcctcacgtgtttcagccccgttggtacttggtactcacagtgctctccataggcccatgcagaagcaagcctcccacagaaggacccagtgtggtaagaaacctgagtgtgagtccggggggactttccatgtgtgggtaccgcagtggctcaggggaggggcaacatagtcaggggaaaccatccccttaccgtccaactgcggtttcactcatttttgcagtccagcggggcttcccagtctcactcacggtcagtttccttagccctcataaaggcacttttgtgcgtggatagaagccgttccttcatgcattctttctcattccattctggggctagatgcaatggggcagaagtaaatatcttccaggagaagttatgtttctatggaggcccgttaggaagtagtggaatgtcatggaaggagcgctggaattccgccccgtcgctcacctgcttcctaccccttactcagctatatttttctttacagtatttttcacaatgaaaaattatattactttagtgttttgtatttttattggctttctcccatagtagaatataaatgtcatgagagcaaggactttttctattgtgttcactattgtgttccagagcttggagtgatatttgacacattgtaaatgctcaatacatatcagatgaatggatagattaatggatgggtggatggacagatgggtgggtggatggatggatggatggatggatggatggatggaatacagatcaaagccccttgtaccattgtgtccttcaaaacatggttcagggcaggcacagtggctcatgcctgtaatcccagcactttgggaggccaaggcagaaggatcgcttgagcccaggagctcgagaccagcctgagcaacatatcaagaccccatctctacagaaaaactttttaaatcagcagggtgtggtagcatgcacctatagttcccactactcagaagtctgaggcaggaggatcccttgagcccacattcaaggttgcagtgagttatgatcacactactgcactccagccggggcaacagagtgagactctgtctctaaagaaatgcttaattagctgggcactgtggcccatgtgtgtaatcccagcattttcggaggtcaaggcaggaggatcacttgaccttaggagttcgagaccagcctgggcaacatagggagacccccgtctctacaaaatatttaaaaatcagcctggtgtggtggtgcacacctgtagtcccagctactcaggaggctgaggcagaaggattgcttgaggccaggagtttcagggtgccgtgagccacagtcacactgttgcactgtggcctgggcaacagagcaagacctacctctaaaaaagaaaggaatgaaagaaagaaagaaggaaagaaaaaaaaaaggaaggataagaaagaaaacggagaacaggattgaatcgtcccagtttacttcctgtttacttctaaatttatcccacgcagtaactctcctacctcctgactctccatctcagaggaagaaggctcctatctccaacgtggcctctggaaccacatcgtcagccactccctttggcttcagcatcttcaaaccctctgcagacaattcttctcttttccttgggccacagacattttcaaatattccttggtttgggggctctaactcactcccctcagtggtatctgccccacctcttcaagcagcacctttgacctctgtcttctctttaactcagacttcctgagaaagtgatgatgccctccatgtcctcaactttttttttctttttttgagatggagtctcgctctgtcgcccaggctggagtgcagtggcgcgatctcagctcactgcaacctccgcctcccaggttcaagcaattctcctgcctcagcctcctgagtagctgggattacaggtgcccgccaccacacccagcaaatttttgtatttttagtagagacagggtttcaccgtgttggtcaggctggtctcgaacccctgacctcatgatccacctgcctcagcctcccaaagtgctgggattacaggtgtgagccaccgcacccggcctcaacttttattctcatagtttaattcattcattcaacaacattcctttcagccaggcacagtggcctacacctgtaattccagcactttgggaggccgaggcagggggattgtttgaaagcagaagttcaagaccaacctgggcaacattgtgaaacctcgtctctacaaaaaatttaaaaacattagctgggcatggtggcgcacatctgtggtcccagctcctcaggtggccgatcggggtgggagaatcacttgagcccaggcgttggaagttgcagggagccatgattgcaccactgcactccagcctgggcaacagaggcagaccctttctctacgaatgtatacatatatcttttgaattttctttattcagacttgggggtacatcggtaaacaaaacaaaggcctctggctttgtggagtttgcatgctagcaggcttctccctgcacctctgtggaaactgctattattaagatttccaaagaatagtggctttctccagtcctcatggcatcttttgcattgatgacagcatcctcattttatggtcttcaaactggacccctactctgcttctgctggtgcctcctccttccctacacactgtaatgctctccagggtcctaaattcagttctcaccagactccccgtgctctcgctgagatcacattcacagccacagctccaaccattgtctgtgttggagacaaataattcctaatccgtagtggacagtctcaccttcttccctagctccacacgtgcagtaaccacatgtccaaggggtacctctatcatgcacactgatttcaacatttcctccaccccctgctttccacagtccctcaaggatgaatggcaccatcacctactctattcgttttctggagctgctgtaacaaactgctggtaactagataacttcacagaaatttatttattgaagagttcaggagaccagaagtcccaaatcaaggtgatattggaatcagaagtccaaaatcaaaaccagagttgtgttccttctgagggctcagaggcaaaatctgttccatgcctccacgcctcttctagcttccggcagctcccagcagtgctggcattccttggcttgcagctgcgtgtgccaatctctgcctccctcaacatgtgactatcttctttctttgtctttgtctgtgtctgtttcttctcttcttataagaacgtgtcattttggtggttgtttttgtttgcttgttttttgtcggttttggtgttttttgttttcttgagacagggtctcactctgttgctcaggctgagtgtggtggtatgatcacagctcatggcagcctcaacttcctgggcttaagtgatcctcctgcctcagcctcccaagtagctgggactacaggtgcacaccaccacacctggctaattttttgtattttttgcagagatggggtttagctatgttgcccaagctgatcttgagctcttgggctcaagcaatccacccaccttggcctcccaaagtgctatgattacaggtgtgagcgaccacacccggcttacaccagtctctttggatttagagcccactttcatcaggatgacttcatcttaactttattacatctggcaatgaccctatttccaaataaggttacattcataggtaccaggagtgagtaccatagcttttaggaggagggagataattaaacccataacatccacctactctaccaagctagaaacagaaaaagcatgcctgattttcttcctgtccccatttctcgttaatctatgagcaagttcttctatttcccatcaagatctcccattgagccctccctcagttcgatcttattcttcactccagatccatcttcctcatagcccccagtgacttcctgtgtcactgtgctgttttaaaatgtccagtgccccccactgcccaggggatcatgtctagattctagtttgactcaagggtctttactcagattccacaccagcttaatttctgcttcttcattccatggtttccagacctcagccatacagaatttctccatgttctccaaatatattacagcattctgtcgcttcttccaaagaccctctcttggcccattttcaaacttttagtatggaacatactatttcataatcacattacatatgtgatttgattacatcaggtgtttacatacatctctccctaaaacacctccagggagcattgcccaattaacacatgagctctcttattcctctttttgttgtttttttgtttgtttgtttgaggtagggtctcctccagcccagtctggagcacagtggcacaatcatggctcaccgcagcctcgaacacctggttccatctatcctcccacttcagcatctctagtagctggaactacaggtgtgtgccacaacacctggttaatttttgtactttttgtagagacaaggtttcactgtgttgcctaggctgatctcaaattcctagcctcaagtgatctgcctgtcttggcctctcaaagtgctgggattacaggtgtgagccacggggccctgcctctcttactcctcttaatgtacctaggaattagcatatttcttggcacccagagatatttattgaacaaacaggaccttggttctttcactacctttggccttggataaattgctcaccctctctcaccctgttttctcatttcgtaagctcagagggtctataagtgccctttaagcagtgacagtccacaatcgccctgacctctgtgtgctgttctcatgtcccaagagagcttctctctctttatgatcgggaacaatcaaatcaattgcgaaagagcctggccagtgacactgcaccagcattttcctgaaacctctttgcaaatgattattcagcaaaaggctcggttaggcaataagctccttggcaaagtctcaagacacggtggagaacaagcccagtgacttgctctataatgtctgcaaggctgaacgatttctgcatcaccaagggagccagaaaggagctttttcccattaggtagctcatcttagaaccataaaatctgaggattgctagagaccttagaggtcatagaatcctcctgtatacatccatagcacacatatagtgtaaggaaggaacttggtgagacctgacctatagcaaggtttatcaccccatcatcagggggctgttttatgttcaaaagtcattttctttaagggagtgactacattttgctctatttcaatgaataacattcttaagaaattgtttagggtgcttgttaaatggctaactctatataagcagttgctttgtgcattttgttgcaaacacgatgagatttagtctgctctggaaacttggttctcacgtgacatctaccaaaaacaataatagattatcttgaaggtaacaatgtcagctttttaaatgtctgagtggggggtgggtggaatagctgctttctaagaacaattataaacattcaattgctgaagagaccaatgcttgcctctcttacatgacaatcagaacacaaatgctgtttgtaggtcagagagccgtgtttctggtgctgaaagacaagggcattggtttggctttgcacatgttattgttgaagggaatgctggaggcatttgtgggctgtcatgttccagccaataagtgttggctttagtatatttttcatcaatatgaccttcaggttaattaagaaaacaaatcctttttgctatcgggccatattacctgagttgatagatatttccaattttaagggcctccaaagaggatcattattggagtaacatttgcaaaaataaaatctaacattcagaatgagggagtaagcattgaaccgccaaaacagtaaaatgcccagcagccattcaaaagtgtttgctgtcatctgctggctagactggaaaactacagcaacattcaggagcctgatgtgaagttctcaccgtcggtagagagaatgtctgtgttcctgtttgctatgcccaagcaaataggaattgaccgttcttcgagcaatggagatgcaatttctgaggccgagtgacctacatagagaatacatatttaaagacaaaaatatgagtagagtttcctcagttgcctgaaaagaccaaagagaggaatttttaaaaaatcatttctgaatttttccgtagtctcttccaagtctgggatttgggtttaatagcttaatacaaacacagaaattctaggtggttagtcaggagacccccaggttctagtggggtcacagggaggaatatatagtaacctctctgagcctcagttttctcatttgtgaaaccaaaaattactaaactctcgtcaagctcttggagtctataaaggtcttgttatcctttctggacaaagattacaatcccacacgctcttgctggctgagtcattagaaagtctagcagagtgactagacgctgccagtcagattccaactgaagtttaaagacacgagaccctttgcttagaacaactttgagaatagccatttccttggaggtcagtgatttaagatggaaagcgaaagagaagtggagaggtccatgcaataccctaagagaggaattggacagcttccctcctttcctgccaactgaagagcagatagatgcttccagctctcttggctttccattccactttcagcaccaccagcaaatgaggattatcctagcaggattaatgaatcctctgaggacaggaggaagaagaaagaggtggtaccatacacacacacacaacacacacacacacacacacacacacacacacacacgatgcttgtggttaattatttttctacataataaaatgtattataataaaccttataatgacccatgaaaatttacatggcccatattaatatctcagaacctatgtttggttgccggcccctcgcctgatgacggtgatttctaactgaacaggaaatattgtgcttgtttcttgattcttcaagtattctgacatctggactggaatacctgccatgcgctggccatgtgctaagcactgagggtcttcagcagtgaataagacagatgtagttcccaccttcatggaagacacagtctatcagagacagacacataaaacagaaactaactgggcttggtggttcacgcatgtaatcccagcactttgggaggctaaggtgggaggatcacttgagcccggggtttcagcaccagactgggaaacatagcaagagtgtttctttaaaaaaaaaaaaaaaaagccaagcatggatgcatgtttgtggtcccagcgacagaggaggctgaggtggaaggattgcgtgagcccaggagttagaggctgcagtgagccgtgatggcacaactgcactccaacctgggcaacagagtgagaccctgtcttaaaaaataataaaaattaaaccagaaacaacagaagcaatgaggactaggaggaatgcaaggagtttctctttcacacctgcccatttccttcttctctttgtgagctcctggaaggcctgttcagcaaccggaaccattgcttagtgctacttgcactaagtgtaatagacagaaatattccttctccagggtgtccatctggaagccactggcccacttgggcagcacatagcagttaagaaggaaaggtcatcacaaaactctgaatttttggaagcagaaaaaaccctagaaccaggttttgggagttataaacccacaattctcataggcattaattctatgacataagaattatctcaggtaagttcccttatttgacaaatggaaaagcagctcagatttctcatggggatagagacaagatagaggtgaaaagcttccaaaagttaaaaaggcataaatgaaaattattattgataatatagtaagaagtgtttacagacaagggatggtggctcatgcctgtaatcccagcactttggttggctgaagcaggaggattgcttgaggccaggagtttgagaccagcttgggtaatatagtgagactccaattctaccaaaaaaaaaaacaacgtttttttcaattagctggacatggtggtgtgcacctgtagtcctagctactcaggaagctgaggagggaggatctcttgagcccaggagttcaaggtttgcagtgagctgtgattgtgccactccagccaggacaactctgcctctaaaaactttttttaaaaagatgtgcttatgataaatcataaaacaaatttctttctttctttttttttttttttttgagacagagtcttggtctatcacccaggctggagtgcagtggtacagtctcagctcactgcaacctccacctcccaggttcaagcaattctccctcagcctcccgagtagctgggactacaggcacccgccaccatgcccagctaatttctttttctttttttcttttttctttttggattttcagtagagatggggtttcaccacgttggccaggctcatctcgaactcctgacttcaagtgatctgctcgcctcggcctcccaacatataacaaatttcttaaatcctttcaaaatttagtcatttttaaaagttatcttcctaatcttaacattacaaccagtaatttttgccacataaatcacatatattgttagagattttttttaaatttcctgacaggtgctttgacctcctaatacatgacaagtgaatacattgtctcgaaactgcttctttctagcacccccaaattcagaaggagtcccagtatatcaagtatctctgctgtgatgacacaagaacccttaaccagtgggtcatgggaatacggatagccaaggtgagagagcgttcggacttcaccctgtcttgaacttgccagccaacttcctgacctgggcacagccttcctggtactgtgaaacagctggcccacccttgggttcagccacagacattatcaggtttattcgcccagtgggttttctaaatgggaggagcgatagaaacacgaacctctccagtaaccggatatttactcatggcgagtattgcaagcttagtgtgcaattaaaaaacgcaagatggaacctgtgatcgagttacataaagacacacgtaatcagaactgagcaaagctcttctctaatatgtaggtgaaaaaattaactgactctgttaatctggaaaatgattgaatgtgtatttgttaaattttaatggaaatatccaaaaaaccaactcagacaagtggtgaacagagtagccgtggagtatttatttcttctgtatatgtatattgcaattgagtgcagaatttgggatacatggattcctttccttcttcctttgtgttctctccccagtatgggaagactctctatgataactaccagcgggctgtggcaaaggctggacttgcctctcggtggacaaacttggggacagtcaatgcagctgcaccagctcagccatctacaggtactaagtggaggagaaattccaacacatattcaaagcttggtgctccagttcaaaatgtatccaatacatctatacaaacaggactttgtacacagcattcagaatatgtttctcacctgatgatcaggctcaaactccccgactcagcccagccctcacacacacacccctataacatctgttttctttttcttttctttttttctttctttctttcttttttttttttttttttttttttgagactctctcgcactgttgcccaggctggagtgcagtggcgggatctcagctcactgcaagctccgcctcctgggttcacaccgttctcctgcctcagcctcctgagtagctgggactacaagcgcccgccaccatgcctggctaattttttgtatttttagtagagacagggtttcaccgtgttagccagggtggtcttgatctcctgacctcgtgatgcacctgcctcagcctcccaaagtgctgggattacaggcgtgaaccattgcacctggcctgttttctttttcttctttgctttttttttttttttttggaggtaaggtcttgctctgtcacccaggctggagccctgtatctattttaagcgccttttaacaaagctttgaccacttctttcgtgatattctgtggatgaggtgttgatctcctgtttacagtgagctagtaggtagatgtttcttatcaaagtacaaacattatatcagtccaaggctccattagtgcccagaaaactgttcacaccaagaataagattatgccctggtgttttgatgtcttgcacccaatcctggacagcacattttaaggtaacatgagtcaaagttctgtgtcaaaaggacaaattaaaaggcaggaaaataaaatagcataccaggacttttggggggaaaaaccgcatctaattccagattatttcaaggacccccacattttgcccgaatttctgtctgttgtttctgtgtccaatgtactttttgttgaggacaatgttgaagagttgttcctgtacctgtactcagtgtggtgtgaaactggataaatacattttaaaaaaatcaagaatttttaaaaatatgttttcaaggtttattcttcaattactgaaaagtttttaaaagtaaaacatattgttactctccaggatcccagttagtccagaccctcctcagtgggctttatcaaataccgtactcaccttcctgatctttttgctgaatctcatataaagttttgtcacagaacctcagatttttcttaaggttttgtgtaccatgccatgcctgtgagttgctctctttgctttgtttttatttttgttttttttgtaagaactagccaacaagtatctttctttgctttagagatgcaaactgctttgtattttcagatcgactttcaagaatgttgaaaatgctttgctcactcttcttttctcacttcttccctctcaggacctaaaacaggcaccacccagcccaatggacagattccccaggctacacattctgtcagtgctgttctccaagaggcccagagacatgctgaaacatcgaaggtaaaaccagcaagcagctgacccctataagccatgttctaaaccattcacattattccagtaactgctcttttaaaaagagaaaataagctgagtgcagtagctcacacctgtaatcccagaactttgggaggctgaggcaggaggatcacttgagcttcagtttgagaccagactgggcaatatagcgagagcttgtctctactagaaaaaaaaaattagccaggcatggtggcatgcacctgtagtcccagctactggggaggctgaggagtttgacttgcttgagcccaggaggttaaggcggcagtgatctgtgattgcgccactgcattccagcctgggcgacagagtaagatccagtcttaaaataaataaataaataaataaataaatagaaaatgcagttccaacaactgagaagttactacaatttaatttagttgattgcttgatatttgtaatcttaaagttacatatgctagaatcaaaagttaaaaccagctatcatcacactgcttaggaaaaatgtaagcatttcctttaaactctggagttaattagctatgtttactttgaccaaagtggttttcttggtttagtcaagtgattttagccctctctgatagtagcacatccaagttttaaacccatgggattttacttgccttttttgaataaaatagggcaactagtagtctgaagccctatatgaagtgctaactggcccccaaaatcagattagaagactgctaaaagagttacattataaatagggctgggcacagtggtgagcacctgtagtcccaactacctgggatgctgaggcaggaggatcccttgagcccaggagttcaaggctgcagtgagctctggttgcaccactacactccagcctgggtgacagataaagaccctgtcttaaaaaaaagaaaaaagataaagaagggttacactaaaaatgtgtattttctattttccccattaatgtccttcctacatacatccccaggtgatggaggagaaaatacattgtaaaataatagccaaattggtataattctccataaaattttttcaaccgaatagatcagtgaagattcctttaaatctatcttaaaatcataactaataattattatttagttactaatttagttcaaagcttctcagctgactgtatatattctgttgaatatttctcttgtgtgattcaaaacaaccttaaataactgtgacaatagcatatcacccagctaggacaggcagggtgcttcacttcaacaatttttcacttctttcaccccttcattttgtccatcagccagtggtgaaaacaactaaatattggtatttatcgaacttataattttgacaaccactgcagacctttaaacgttgtatttctttaatgttctcattatcttctcaagcctgacaatctcctcatgcgatgtgctttcagctactattattttcattatttctaaatgccaattgaaggacagcatttaaaaatgctgaaagaaataaaagaatctcagaatagaaatcacttaactatatgtgaacaccaattcccaagctgcctgttcagaaatttaaataaaaagaaaaaatacatcaccagttaaagagcttatcatgtgaagtaaataaactaaataaaatagaaactaaatcagaaggcactttattagaaaaaaattccaaatttaatcttcaatggtaagaggccactaagcagagaatgaaatgaactggaaccctgataaactgtaaattgaaatgataattatcactaaaacagagggattcaatccagctgcctggggatgtttcattatataaattattattatctattccagtattggcagaggaagggctatgcgtctattagacttaggccaaatttggcatgctggtttctaccaatagcacatgctggtgattttacttttcagaactcacatatttatctcatttgatctcatcacaacctgagacacgagtcataatgaggactatggggctaattttatatccagtgaaccagccaagtttcatgcagttgagaaatggtaaactgtccagacgtagtggctcacgcctgtaattccaacactttgggaggccgaggcaggcggatcacctgagtccaggagttggagaccagagtggccaatatgtagaaaccctgtctctacaaaaagtacaaaaattagctgggggtgttggcacacacttgtaattccagctaatccggaggctgaggcatgaggattgcttgagctcgggaggtggagtttgcagtgaggggagatgctgccactgcactccagccttggtgacagaacgagactctgcctcaaaaaaataaaaataaaaataaaaataaaataaaataaagaaaagaaaaagtaaacttattagagaccagatgtcctgtcctgattcctggcccaccacactgccttccctgaagctgtgaggccagctggagccaagcttgtaatcggctcctccctagaagcccacagtcctggcaaaatggacctgtgttctcagctcaccaacacaaggagacattgtccccaaaatcaggcagaaaggtctttgccaggcaacatatcctttgtgcctacgtttgcacaaagcttacctgtagccaagagagaactatttccattcactcttccctttccatctccttcatcctaatcaaagtaggacatttaagccaggagactgtgtgaaggttttgggaagtcctcaacccccaggagttgctgtgtgtttctactgtgtgttgtgtggaataggagcaagataattttacagacgcttactcctgacacgagcttcacaaccagctcaactcagaccaagaaaaaatgtatcccttcctatatgacgaggactctggtggcttggcttgagaaccaaggagtgaagtcatttggcttccattttgaaggaatgaatgagctgagggtggtttatagactgagccaaccccacaagagatataccacgaaagcccctttagagacacacagcaactcctggataaggcaagttccaaggaagtgatactcatgtgatctaaatacgatctaaacacctcattgaacatagccagatcttccatttataggagacttggtagatgagtgccacagggtaactgaacccaggtttggctgctcaccacttaaaagccagactcaagagattagggatgatgggaggaaaaggtggtttatttggaaagccagtaacaccatgaagatggtgactagtgttctaaagtgcaatcttaaatttttcaggctaactggaggattttaatgggtgtgggatatggggaagaggagagagttggggagagagttgagatcaaaagatgaccagagactgcagacatctgggtgccaacaagagtccaaagaggttgggaactactctgtccttggtcaggttacaatggtcatataaatctttaacaaaacatagttgtttacttctttaatcccacagttagtttttaaaactacatgattgctgggtttgcatatttatatcagtgctctaaaattatcctatgtgcaggaatgggtaaaggccactttaaacaaaaatgaagtaagttacattcgttttttttgctgttccactgtaacaacaggaaatactgttaaagtccatttgggccaggtggggtggccgtaattccagctactcaggaggctgaggcaggaggatcacttgaggctaggagtctgagactaacctgggcaacacagcgagactccatctctaaaaatatatatagagagagagacatagtctcgttgtgttgcccaggctggagtgcaatggcatgatctcagctcattgcatcctccaccttccaagttaaaacaattcttatgccttagccaccccagtagccgggactacgggcgtctgccaccataccaggctaatttttgtatttttaaaggagaaaaggtttcaccatattgttcaggttggtcttgaactcctggacttaagtgatccacctgcctgggctcccaaagtgctgagattataggcatgagccaccatgcccagccaaaatattaaaaaattagaaaaatgattatttttaattttaaagaccatttagaataattgccttattccagaacaaagatgagctcatgaccgaccaggagtctcagtgactgagggacagaggctccccagggggcggacagagactcacatatctatggcatggccctgtccactagggctgttttgtccactggggctgccttgagaataaggaatgctactcgggaggtcgaggcaggaggattgcttgagctcgggaggtcgaggctgcagtaagtccagatcgcgccactgcactcagcctgggcgacagagtgagaccccgtctccattaattaataacaataaatttaaaatttcaaaaattaaaaaaaaaatgaatgctactgccactcggttgcaggataagaagccagccctcgggaaccaccacgacccggcagtgccccgggccccgcacgcccccaagtccagcctgcccccgccccctccggtgcggaggtcctccgacaccagcggcagtcccgccacgcccctcaaggccaagggcacaggcggcgggggcttgcccgccccacccgacgacttcctgccgccgccgccaccgccgccgcccctagatgaccctgagctcccgccgccgcccccggacttcatggagccgcccccagacttcgtgcccccgcccccgccgtcgtacgcagggatcgcgggctcagagctgcccccgccgccgccgccgccgcccgcgcccgcgcccgcccccgtccccgactccgccaggccgccccccgcggtggccaagaggcctcctgtgccccccaagaggcaagagaacccagggcaccccggcggagcaggaggcggggagcaagatttcatgtcagacctcatgaaagctttgcaaaagaagagaggcaacgtgtcctagggacgggcatgatgagtgttccagagggagaagcatcgctgaccccgagcgcaggttttgctagcagattgccctgacatcttgttcatttcagataaaatgtgatgggaaacttctcactgatgtgctcaagtacaggcataaccattaacccagtagagttcagaatatctgcccaaatgtacatatcgttcccatgtattttaacctaaatggaatgtatcttcccttccaagctgcctaaagcgctgttttaggttcatttattttattatgttcagaagcatcaaataaaagttaaacgtttttccggaagacggtatttctagaaagattattgggtcaatctatcttgagatcaacactataattaaaaatagctttcaacatcccatgccttcttaagtcttggtgacctcagatagactttcatgtctatctctataacctttagaatttgcaggaaaatcgagagaggaaaacgagaaaacatgacaagcagagcctgtttcctttctctgagattccgtggcttgattgattggagtcctggacactggctgttttggttttgcttttataatgcttgaataacagtaattgaaaaaaatagttatttagatagtttttgaattctctgttattacaatgctgttagtatcctgtaaataaaaatgtaggggcaggaaaaggcaatcatatatatattcttcaacctgaaatgttttccctcagagataagtttaatgcccaatttatcctaggttcttggtacctatatctcttctctttcaaattggcttctgataggccttttacattttcttagttttatttacatcgctctgtttttgtttttgtatttttgtggggtttttttttttaaactgtaaaactcaaaatcttcttaaaatgagtggaaaatcataatgcatttttttaaataaaggaagataattaatgctatgttttaatatttggagaaaagtaagctctaaatcatgctgtgtcaactcatgggctgcaggtggcccaggacccctttgaatgctgcccaatacaaattaaaatattatagctcttggcagggtgtggtggctcacacctataatcctagcatttttgggaggtggactcagatggatgacttgaagtcaggagtttgaggtcagcttggccaacatggcaaaaccttgtctgtactaaaaatacaaaaattagccaggtgtggtggcgcatgcatgtaatcccagcaactccagaggctgagatgggagagtcccttgaatccaggaggcagacactgcagtgagctgagatcatgctactgcactctgtcctgggagatggagcgagacactgtctcaaaaacattatgagatttttctcaactttttgtgttgttgttcatcacctatcatcgctaatgtaagtgcattttatatgtagcccaagacaattcttccagtgtggcccagggaagccacaagattggacacccctgcagtttaaatgaacctttaaaatgaaaaaaaaaaaaagaatagttttaaaaccaaaatatttagtaattaaaactggcagggtgctcttaattttttctggagcatatgcttgaaataggatagaaggtaaatttgctttacattcaatttaatcccatgaacagtaactctccccagttctcattttattatgttcctttgacattagatgcggtaaaaacgctgcttttctgatacccaactaaatcatggtcattatgcagatctctgggacaatacaggaaagatgtcagcaaagagaagtgtgaaaattgtcagaatcaaaatggagtcacttacgttaagaaaatgctgacaaatagagccagccaagtccatgaaacgagagttttcatgaggataatattctgtgattttcactcaagtgtaatgcaatctttggtgtctggctgaaaggtctgtacaagtattacgtatacctgagtaggattatttagatcctgaaaatgcagcaaaatttgtttctttatgaaaagtttagtgagatatttgtatgtggtgcagggggtggaaaaactggagtgaaattgggaactagagaaggagtacgtggataataatatatgttatgaataataatatataagcaataatataggacagtaatcctgtatcacagcttataaaaactcagtaatttcttgtataatgcttctaatggggcattgcaataggccaactgcaatacaaaccgcagcatttggcagagtttacagaaaacatgatttaactttagttcatgatagaatgtgaactaagattttacagtaggtcctcaaggaggagaatgaacatttaagcctcgtattttgtttgatcatgggaatcttggctggtatgatactgaaatgacccaattccatgataattgaggcttcgaagtgtgtttaagacttatggcttgatgtgtgatccatttttaccgacggtttatgtgtacttgggtacaatatacatgttctttagaacaagcttgtgaagcatgttgcacaaatcttctgcctgcagcctgttatctggtctgtcgcatccatcaattactaagaagaatgttttaaaatcttctgagggcaaatttgtcagtatcttttcattgttctggcaaattgtgctttatatattccgacactgtttattattaagtgtaaacaaaaattacgtatgtgacttcctggtgaattgaaccgtccatcaccatgcaatgttttctgctttttgtcttgtactcatgcagctgtactgtcttttttcaggtatttgcctgacaaatctattcatgcactttcaaactcgtcatgcctttatgttctacatttgccacttgtaaatgacatataagcagattttgttgtgtttatatctagttagtaattattatcttttaactgcaagtttattctttttaaattttttaattttctttttttttttttatttttagagacagggtctcattctgtcacccaggctggagggcagtggtgcaatcatggctcactgcagcctcaaccttctggactcaagccaccctcttgcctcagccttccaagtagctaggactacaggctcataccaccatgcccagctaatttttttttttttttagtagatatgggggtctcactatgttgcctaggctgttctctaactcctggcctcaagcaattcttttgtcttaacctcccaaagcgctggaattacagacatgagccaaaacgcccagcctattatttttactctgaatgtgattacatagtttgtttttaacatcttattttgtacttactattaccctggattcttctgggatttttgcttcctttcttgtctacttcatgtgattaggattttcctcttatcctctttttgaggcttcttgttgaaaacttatatactgtatgtattcttttaatagctacctataatgataatatccatactcaaagtctcaagttaaacaactttaaactagaaaatacatggactttggaccactttgatttcgcacacacacacacaaacacacacagagacacacacacatattttctagtatttgaggtacagctgagtatttttttcctagaatatctttatttcaccctcattcttcaaagatggtttcagtggatgtaaaatttcaattgatggtaaaaactcttcgttttttgaggggattgtccccactgtcttctccctttcactgttgctgttgagaagttacctgtgaaattattatttccattaggtcatctctttgtttcccctctgcatgattttaagaccctttctttgtctttggtgcatagagtgggtctaactctgaatttattttattaagttgtctgataattcattgaggtttctgaatttacaaatatctgcctttcactattccagaaaattgtaatttattttgttttcaaacattgcttctccttttttgcttcttctgaaactctaatgaaatgtgttaaatcgtctaacactagcttctttatctctaaattgtgtgtattttctatttctttatctattctggatatattcatcagatcttaattcccattcaccaattctttcttcagcataatctaatctatgttaaagtcatccatttttggtttttgttttttgaaatagactttattttttagaccagtattagattcacagcaaagctgagcaaaatgtacagggagttctcatttgccacttgcctcatacgtgcacagtctcctccactaccacaattctacaaaaatagcactgtaacaattgatgaacctacactgacacatcattagcatccaaagtccatagtttacttagggtttactcttgaggttgcacaatctgtgggttttcagaaatgtacaatgacatgtatccaccattatagaatcatgtagactagtttcactgtcctaaaaatcctgtgttctgtctgttaatctctccctcccctttaaaccctggcaaccactgatctttttcattgtctccataattataccttttgcaaaatatcatatagttggaatcatacagtatgtagtatcttttttggtgaggtgtcattcagaccttttgtcactttgttaactggactgttcattttcttactgttgagttttaatggtttgtgtattttggataacagtattttatcagatatgtcttttgcaaatgtttttccccatctgtggcttgtctgttcattctcttgattttgcacttcacaagggtttttaatttgaatgaagtctagcttatcaattatttatttcatggatgatgtcattggtggtgttgtatctaaaaagtcactgccatacccaaggtcatctagattttcttctatattatctactagaagttttatagtttacttagttctctgatccattttaagttaaattttttgaatgatgcaagatctgtgtctaggttctttgtttttgtttttccatatggatatccacttgtgccagcactatctgttgaaacgactatcttttcattattacctatgcccttttgttaaatgtttgtataagcccattttggggctttctgttctgttccact

SEQ ID NO: 1156 - DNA, 1167 bp, Homo sapiens
tggaaccatcactaggccccaatcccttagtccctcttgcgtcgaggctgcaaaatggttccattcgccaggagacgctcctgagagaagggcgcgcgcggcacaggggccttccttgcacctcggagcaaagcagctcggatagcgccacacgtctgcgcgctgcgtgggaagggcagggctgacagcacttcctccccggggcagcgacctggagcccgggtgcggcagtctgcaccgcgcgtcgctttcccggccggagtctcgccgccttcccgcgccccgcagcgccccgcagagcagtcgagatgggtgagtcaagtgaagacatagaccaaatgttcagcactttgctgggagagatggatcttctgactcagagtttaggagttgacactctccctcctcctgaccctaatccacccagagctgaatttaactacagtgtggggtttaaagatttaaatgagtccttaaatgcactggaagaccaagatttagatgctctcatggcagatctggtagcagacataagtgaggctgagcagaggacaatccaggcacagaaagagtccttgcagaatcaacatcattcagcatctctacaagcatcaattttcagtggtgcagcctctcttggttatggaacaaatgttgctgccactggtatcagccaatatgaggatgacttaccacctccaccagccgatcctgtgttagaccttccactgccaccaccacctcctgaacctctctctcaggaagaggaagaagcccaagccaaggctgataaaattaagctggcgctggaaaaactgaaggaggccaaggttaagaagctcgtcgtcaaggtgcacatgaatgataacagcacaaagtcactgatggtggatgagcggcagctggcccgagatgttctggacaaccttttcgagaaaactcattgtgactgcaatgtagactggtgtctttatgaaatctacccggaactacaaattgagaggttttttgaagaccatgaaaatgttgttgaagtcttatcagactggacaagagacacagaaaataaaatactatttttggagaaagagaaggagtcccagtatatcaagtatctctgctgtgatgacacaagaacccttaaccagtgggtcatgggaatacgga

SEQ ID NO: 1157 - protein, 287 aa, Homo sapiens
  VARIANT (1)...(287): Xaa = Any Amino Acid
MGESSEDIDQMFSTLLGEMDLLTQSLGVDTLPPPDPNPPRAEFNYSVGFKDLNESLNALEDQDLDALMADLVADISEAEQRTIQAQKESLQNQHHSASLQASIFSGAASLGYGTNVAATGISQYEDDLPPPPADPVLDLPLPPPPPEPLSQEEEEAQAKADKIKLALEKLKEAKVKKLVVKVHMNDNSTKSLMVDERQLARDVLDNLFEKTHCDCNVDWCLYEIYPELQIERFFEDHENVVEVLSDWTRDTENKILFLEKEKESQYIKYLCCDDTRTLNQWVMGIRX

SEQ ID NO: 1158 - DNA, 1180 bp, Homo sapiens
tggaaccatcactaggccccaatcccttagtccctcttgcgtcgaggctgcaaaatggttccattcgccaggagacgctcctgagagaagggcgcgcgcggcacaggggccttccttgcacctcggagcaaagcagctcggatagcgccacacgtctgcgcgctgcgtgggaagggcagggctgacagcacttcctccccggggcagcgacctggagcccgggtgcggcagtctgcaccgcgcgtcgctttcccggccggagtctcgccgccttcccgcgccccgcagcgccccgcagagcagtcgagatgggtgagtcaagtgaagacatagaccaaatgttcagcactttgctgggagagatggatcttctgactcagagtttaggagttgacactctccctcctcctgaccctaatccacccagagctgaatttaactacagtgtggggtttaaagatttaaatgagtccttaaatgcactggaagaccaagatttagatgctctcatggcagatctggtagcagacataagtgaggctgagcagaggacaatccaggcacagaaagagtccttgcagaatcaacatcattcagcatctctacaagcatcaattttcagtggtgcagcctctcttggttatggaacaaatgttgctgccactggtatcagccaatatgaggatgacttaccacctccaccagccgatcctgtgttagaccttccactgccaccaccacctcctgaacctctctctcaggaagaggaagaagcccaagccaaggctgataaaattaagctggcgctggaaaaactgaaggaggccaaggttaagaagctcgtcgtcaaggtgcacatgaatgataacagcacaaagtcactgatggtggatgagcggcagctggcccgagatgttctggacaaccttttcgagaaaactcattgtgactgcaatgtagactggtgtctttatgaaatctacccggaactacaaattgagaggttttttgaagaccatgaaaatgttgttgaagtcttatcagactggacaagagacacagaaaataaaatactatttttggagaaagaattcagaaggagtcccagtatatcaagtatctctgctgtgatgacacaagaacccttaaccagtgggtcatgggaatacggatagccaag

SEQ ID NO: 1159 - protein, 288 aa, Homo sapiens
MGESSEDIDQMFSTLLGEMDLLTQSLGVDTLPPPDPNPPRAEFNYSVGFKDLNESLNALEDQDLDALMADLVADISEAEQRTIQAQKESLQNQHHSASLQASIFSGAASLGYGTNVAATGISQYEDDLPPPPADPVLDLPLPPPPPEPLSQEEEEAQAKADKIKLALEKLKEAKVKKLVVKVHMNDNSTKSLMVDERQLARDVLDNLFEKTHCDCNVDWCLYEIYPELQIERFFEDHENVVEVLSDWTRDTENKILFLEKEFRRSPSISSISAVMTQEPLTSGSWEYG

SEQ ID NO: 1160 - DNA, 1614 bp, Homo sapiens
tggaaccatcactaggccccaatcccttagtccctcttgcgtcgaggctgcaaaatggttccattcgccaggagacgctcctgagagaagggcgcgcgcggcacaggggccttccttgcacctcggagcaaagcagctcggatagcgccacacgtctgcgcgctgcgtgggaagggcagggctgacagcacttcctccccggggcagcgacctggagcccgggtgcggcagtctgcaccgcgcgtcgctttcccggccggagtctcgccgccttcccgcgccccgcagcgccccgcagagcagtcgagatgggtgagtcaagtgaagacatagaccaaatgttcagcactttgctgggagagatggatcttctgactcagagtttaggagttgacactctccctcctcctgaccctaatccacccagagctgaatttaactacagtgtggggtttaaagatttaaatgagtccttaaatgcactggaagaccaagatttagatgctctcatggcagatctggtagcagacataagtgaggctgagcagaggacaatccaggcacagaaagagtccttgcagaatcaacatcattcagcatctctacaagcatcaattttcagtggtgcagcctctcttggttatggaacaaatgttgctgccactggtatcagccaatatgaggatgacttaccacctccaccagccgatcctgtgttagaccttccactgccaccaccacctcctgaacctctctctcaggaagaggaagaagcccaagccaaggctgataaaattaagctggcgctggaaaaactgaaggaggccaaggttaagaagctcgtcgtcaaggtgcacatgaatgataacagcacaaagtcactgatggtggatgagcggcagctggcccgagatgttctggacaaccttttcgagaaaactcattgtgactgcaatgtagactggtgtctttatgaaatctacccggaactacaaattgagaggttttttgaagaccatgaaaatgttgttgaagtcttatcagactggacaagagacacagaaaataaaatactatttttggagaaagaattcagaaggagtcccagtatatcaagtatctctgctgtgatgacacaagaacccttaaccagtgggtcatgggaatacggatagccaagtatgggaagactctctatgataactaccagcgggctgtggcaaaggctggacttgcctctcggtggacaaacttggggacagtcaatgcagctgcaccagctcagccatctacaggacctaaaacaggcaccacccagcccaatggacagattccccaggctacacattctgtcagtgctgttctccaagaggcccagagacatgctgaaacatcgaaggtaaaaccagcaagcagctgacccctataagccatgttctaaaccattcacattattccagtaactgctcttttaaaaagagaaaataagctgagtgcagtagctcacacctgtaatcccagaactttgggaggctgaggcaggaggatcacttgagcttcagtttgagaccagactgggcaatatagcgagagcttgtctctactagaaaaaaa

SEQ ID NO: 1161 - protein, 288 aa, Homo sapiens; identical to SEQ ID NO: 1159

SEQ ID NO: 1162 - DNA, 142021 bp, Mus musculus
  misc_feature (1)...(142021): n = A, C, G or T/U
caggtaatattatgtccaattttctgagaaactgccagactgattttcagagtggttgtaccagcttgcaatcctaccagcaatggaggagtgttcctctttctctacatcctcaccagcatctgctgtcacctgagtttttcgtcttagccattctaactggtgtgaggtggaatctcagggttgttttgatttgcatttccttgatgactaaggatgttgaacatttctttaggtgtttctgagtccttcaagtttcctcaattgagaattctctgtttagttctgtttcccattttttaatagggttatttggttctctggagtctaacttgttgagttctttatatatattggatattagccctctgtagaatgtaggattggtaacgatcttttcccaatctgttggttgccgttttgtcctattgacagtgccctttgcctttcagaagctttgcaattttatgaggtcccatttgtcaattcttgatcttagagcataagtcattggtgttctgttcaggaacttttcccctgtgcccatgtgttcgagacttttccccactttcccttctattagaatcaatgtatctggttttatgtggaggtccttgatccacttggacttgagctttatacaaggagataagaatggatcaatttgcattcttctacatgttgaccaacagttgactgacagttgaaccagcaccatttgttgaaaatgctgtcttttttaccactgtatggttttagctcctttgtcaaagatctagtgaccgtaagtgtgtgggttcatttctgggtcttctattctacttccattgatctacttgcctgtcactgtacaaataccagccttttttttttttttaatcactattgctctgtagtacattttgaggtccaggatgctgagtcccccagaagttcttttattattgagaatagtttttactatcctgggttttttgttattccagatgaatttgagaattgctctttctaactctataaacaattgaattggaattttgatggggattgcattgaatctgtatattgctttcggcaagatggacatttttactatattaatcctgccaatccatgagcatgggagatctttccatcttctgaggtcttcttcgatttctttcttcagagacttgaagttcttatcctacagatctttcacttctttggttcgagtcacaccaaggtactttatattgtttgtgactattgtgaagggtgttgtttccctaatttctttttcagcctgtttatcctttgagtataggaaagctactggtttgtttgagttaattttatatctggccactttgctgaagttgtttgtcagccttaggagttctctggtgaaatttttggggtcactcatatatactatcatatcatctgcaaatagtgatattttgacttcttcctttccagtttgtatccctttgacctccttttgttgtctaattactctatatagaacttcaattactatattaaatatatagggagagagaggacagccttgtctagtccctgattttagtgggattgcttcaagtttctctccatttaatttgctgttggcaactggtttgctgtatattgcttttactatgtttaggtatgggccttgaatttctgatctttccaagacttttaacatggagggatgttaaattttgtcaaatgctttttcagcatctaatgaaatgatcatgagggttctttctttgagtttgtttatatagtggattacactgatggatttctgtacactgaaccatccctgtatccctgtgatgaagcctacttgatcatagtgaatgatttttaagactttaaatctatttatttttgtttcagttttatgatggttttacctgcctgtgtatatgtaaatcatgtgtgtgtgtgtgtgtttattggcaggcgtcaaatgaaagcatcatatatgttagagctagagttctagatgactgggagtggatgtaggaatgaaacctgggtcctccatacgagcaacaactgctcttactactgaacacttgaacttaaaaaaaaaagtcatatatttatgtgtgcatgggggaaattttcacatgagtgtgggtgccttcagaggccacacaaggacatcagatccactggagttggagttgatgataaacccctggcaagtgcttataacagctgatccatctctcctatctctataacctttnnnnnnnnnnnnnnnnnnnncctccctccctccctccctccctccttccttccttccttccttccttcctttcatagtttttcaagtcagggtccctctagctctggctgtccttgaactcactctgtagaccaggctggcctccaactcagagatccacctgcctctgcctcccaagtgctgggattaaaggttctaatttctttcttttctttttcttttttaagttttttagacaaagtctcatatcttgtgtagcccaggatggcctagaactcctcatcctcttcctgcctttacctccttagtgcctggattatagacgtgaacagtttataattttatcttttcatgaactgtatttgtgccagacattgtgacacacacttgtaatcctagcactttggagtctgtggcatgaggatttcccatgagtttaagggcagcctgggctacatagtgagttccaggccatcctggggtatagagcaaggagaaggcggagggggtcaaagcagaaagaggaggatacaaaagaagagaaatcatgaggtttgttttgttttgtttttctgagttctgaccctgcagaagcttcctccttgctctcagcccccatgcttggcattggctatttctgatcccattctgagcatttcaggtatctcttgagagcaggaggacttgtcagtttgtgaccagcatttcctttgtttaacatccaggaggcttatccaagtcacaatgtatcagagtttcctaaggctggatgttttcttgaatacatgtgtgttctactggccactggtctgctctggcctactggccagccctggcctcccagtccttgtgagcagcgcgcactttctaaacactttcgcagcactctgtttttaatgttttggattaaatatgtagagggagaccgccgggtcatttggtagttctgtttaacttatttatatttcattgaaattgcattattcttattgtgtgcctatagaagtcatagtacaactttcaaaagtcagtctctgttttcatcgtgggatctgagcctcaaacttgggtcgttgttttgtttgggctaggtcttgctaatagagccttgcctggcctgaaactcatcatgtggactgagctggtattgaacttgcagcaatcctccttcctctcctgggtggtgggattatagggatgcagcaccgcccctggctacttccaagttttttaaggacacatcatactgtttcccatagcaactggattccgtttacttcgcattcttgttaatacttgttattttctggggagtttgctagtagccacatcctaatgaagatgaactggaatgtgcctgtgctttgactcattgttccctaatgattcatgatattgtccaactcactatgggcccttttggtcatttatagactttttttttagagatgtttatctaacctttgcccattaaagctatctatttatatatctaatttatttttggtggattgaacccaaagctttgcctaaacatatagcttaccactgagatatatctccaggtccctttgtctgttttggtgtggagggatagttgtagtagagtttcaggataattccttgatggataaaacatttgacatctctgaagtggaaacctctggtttctttggaaagtcagttatgccaaatgatgttttgctggggcacacaggtgaaaggatgttttgctaaagcagacatgtgaaaggatgtgtgatgtctagaaaggatgtaaaaaaagaccccatagaccaggggtggggagggctggagcattggtttactctttttgctgatgacacgcatgtattggttctcctgacattgcattgctgaacttcacttgtggtggcgtcatagagagaaatgaactcctggtgagattcctatggcttcttaccacttgctctgactcaggctggtggctgagcctagcagtttcttctggattgaactgtttttgctgattcgtgtgtagtatctgccaagtagaccagactgcagctgctaattcgtgtttggtgtttgctagtggactgaactgagaacaatgaagactggaatcaccccaaagaaccatttctaaacaggctcactttccctgtttcctattaactgttcttttccactacctctgataagtggtgggctagaggggaggttgaatcttattaaagtaggttgtgaaaaatatatgcctatacataccacttccatctgcgcttgctaaaagtatttattctgctaatggtaagtgtgtggagagatatgtgtgtgcatgtgcgtgtatgcaggcacacgtatggaggtcagagctgttgaaagctatcttctcaattgccttccaccttatttttaaatgttcatttatttattttattttgcttgtattgtgtgccagagtgtatgtaggtgtactatgcgcatgcagaaacctttggaggtcagaagagagtattggatcccctggaattggaattgcaaacagttgtgagccataatataggtgctgggaaccaaacccaggtccacagcaagagaaggataggaatcttaaccactgagccatctctccagccccatccaccttaatttttgagacagggtctctcactgaacctggagctcatggactcagctagtctgatggcagcaagctctagggatcccccagtctctgcctccccagtatggggtatacagccattcttgtgctcagcttttgatggagttaccagagatccgagtttggacccccacacttgcacatcaggcgctttaccaactgagccatttctctagactctatgctgtgctggttagtttgtcagctagagacacaggggaagagagaacgtctactgagagctggcctctctcaagactggccttgggcaggtctgtggagcatttccaggtctggtgactgatgtgggagggcccagcccactgtgatagtgccaccttgaggaaggtggtcctgggtcatataagtcaggctgaggagctggcgagatggtaaaacactgactgctcttctgaaggtcctgagttcaaatcccaacaaccatatggtggctcacaaccacccataatgcgatctgactccctcttctggtgcatctgaagacagctacagtgtatttatgtataacaaataaatctctctcagaaaaaaaaagtcaggctgagcagactgtgggaaagagcctgtaagcagcattccccatcggtctcttcctcagcctccaggttccagcctggcttcttcaatgatggactatggctggaaatattagtcaatgaaccaaattacttttggtcatgatctttagcacagcaacagaaaggaacctaaaatacccccccaagagtgtctttctatacccaaagcttcagatgtttctcatgatgaacactttgtctgttattacctgtgtcttttggtatcatgtcaaagaaacaattgcctgatctgacactatacaatatatgtctgtgtttgcttctgagagttctatgccttgcatctaagccatggacctgttgtgaactagaatttgtatatggtgccaggttagggtccagcttcacacttctgtatgtggatgtccaatttctacaatactacatggtttacaaaaagttgttatgagttgaattgccttgggctttcaatttaatattttaaatattaatttaatatctttcaatttaatattttaaattgtgagagtttttttgctatgccttccatcccagttcatcaatctacatgccttgattgctttgttctcctcttcttcctcctcctcctcttcttcctcctcctcttccttatcctcttcttcctcttcctcctcttgtccttcatttgtgctgggaattaaactcagggcctcacccatggaaggagttacagagacaaagtttggagctgagacgaaaggatggaccatctagagactgccacacccggggatccatcccataatcagcctccaaacgctgacaccattgcatacgccagcaagattttgctgaaaggaccctgatatagctgtctcttgtgagactatgctggggcctagcaaacacataagtggatgctcacagtcagctattggatggaacacagagcccccagtggaggagctagagaaagtacccaaggagctgaaggggtctgcaaccctataggtgggacaacaacatgaactaaccagtacccccggagctcatgtctctagctgcatatgtagctgaagatggcctagttggccatcattgggaagagaggccccttggtcttgcaaactttatatgcctcagtacaggggaacgccagggccaagaagtgggagtgggtgggtagggaagtgagtgggggagggtatgggggacttttgggatagcatttgaaatgtaaatgaagaaaacacctaattaaaaaaaatcaaagtaaaaaaaaaaataacttgacagtgcttggcttgtagagctagctgtgcaacttctcctggcatccctcctggtccctcctgctgactccagctgaggctgaggcatggctgtctctgctaggtagtgctactgctgccgattcgtgcttgttatcccaactctactgaactgagtggatggagcagccactgcctgctgacctgtgaactgaactgccgatttccagacaacacagatgggatttgttccaaagaacctttctatacaggtccacttccctgcatcctttcttttccactacctctggtgggtggtgggctagaagggaggttaaagcgtttaagagccatcattaaaaataaggattgaaaacattaaagttacacttctgagacagggtctcttattgaaactggatctcatttcttggctagcctggttggtcagtgactctccaggaccctcttccaaacctctccagaactaggattacaggagtgtactgctgtgcccagcttttggcgggtgccagagatttgaactcaggtgttcatgcttgcatgacaaacactttagcaactgagccctcagcccctcatgtcagattggtttttttgtttgatggttggttggttggggttttttttttttttttttttgggttttttttttttttttttttttttttgcttttaaaaaagtatcttaaaattttgtttattgagtgcacacctgtgtgtgcattagaaagctcggagcctcaggagctggtgtgatagacagttgtgagccctagacatggaccctgggaactgacaacacattgattgcttttgacagtgtgtagagaggtggcctgagcccagagcatgtggccatcacttgtatcttggttatctgcagttggatctgactgggtcctgagtttctttctttctttttttctctttctctctttctttctttctttctttctttctttctttctttctttctttctttctttctttctttctttctttcttctctggctgtcctggaactcactctgtagaccagactggtcttgaactcagaaatcagcctgcctctgcctcccatgtgctgggattaaaggtgtgcgcacccagctcctgtctgagtttctgaccacgaaagccagcacctggttgataaccaggaggaagctggtactgtggggcctcagggaagggttctaagggtgaataacaaagaaacccgaaagatggtggcgtgtccgtggagaggaggggcaagaacattctagcagctggagtggcctaggaggacaagctaagttaaggcaaggaaaagggaggctttcaccctcgattagctggctcttaatcccgagtgtgtgctactatggctatgagcaccttggaaccttaggaagcaagttctacgagtctgcttggcatcgatactttttgcaaattcctcgctatctgatatgcagcaatttatcacatggatttgatcttgttcttaggaacctcaaacctgactgcgcctacatttattgttccattcctcacttcagaatttggggcatgaaatattgacgctctgagctcagaagtctggaaggctaagcacccagggagagctggagggcgggccttgagcgattcgccaattttgccttgctgatgcagcttccaccagagcagagcagagccattctggccctgagcagccatttgtcaacttgaaaagggaaatgaatttgtcaatctttggcttggcctttgacccctagagggttcggacccatggctctggaaatttggctgccgattgtaggcagccctcagtcacagaatcaggggactgtagagtatagggagatggaaatagaaatctttggtggcatccgtcaccctgaacttctccctgcacatctctcaaggtttgccctaccactagcttacatatctagaggcaaagcagacttctaagtgttcttaagttacatagtgtgtctctgtgtgtgtgtatatgtgtgtgtgcaagtcagagaacactctgcagaaattggttctccctcagccgtgtaggtctagtcaagttcggcagcagttgcatttacttgctgagctatcttggatggtccctagcctagcactcactttctctctctctctctctctctctctctgtgcgcgcacacatgtgcttgcacactcgctgctgatgtgaattccatcttagctaaaaacagtgagcagggagcgcccttccctgtatctcttgtcttgctaaaacgtattgctcactaatacttaatgatatgatttgactctccaacctattcatgagcttgtttgaagggaagaatccactgggttagtcatggtaggatatgacatcatacatagcaaaggttctttgaatgcctaaaatgaactgtaaacgaactcatttgcatactagaaaagactgctctttaagctggatgttcccattggagggtttcgtgagcaaagcaaaccagatcttctgtgtcactccaggtctgggcctcagccttggcttggaggatcggggcccacatctggctaaaggttctgcctttcactggcccttgagactcacatagtgtgtatgggggatgacggggtgaaggtgggtggcagtcccaaacgttgttgagcaggcttcttgtgttttcagtgttgttgagtctagtttaggatcaattagaggagctttgggcctgaggaggatgctgaacttgggtaacagacacggaaagctagcccacaacttgagatggaaaactctgggtgaccggaggctctgatctttgatgggagggcatgcggaagtcctgaattggagctgtcagtcataggtttgatctctttctctgtgtctgaggaaaggggtggggtctataccgagctgtggcgcggaggactccaagccggtagagggcgctgcgcctcgcgccaggcttagttcggctccgggccatcagggggcgctgtggcgcgagcggcgcggtgggcttccggcaggtggcgccgtggccgcggggcccaggccggcgggcgggcggcggcgcggcgctgcggccggcggctcgcggccccggagcggcggctgcgcgggagnnnnnnnnnnnnnnnnnnnngagcggcggctgcgcgggaggtggagcggcggagtggcaggcccggtgcgggctggagcgcgggcggcgagcgcacgagccgcggccgcgcggagcccgccatgacggcgcgagtgtgaggcgcggcgagcaccggtccagtagagcggcgggcgcgccggcctcttatcccgcagcggccgggccgggccctgatgagcagcggcctcggcctccggcgcagcccggaaatgtccggcaagatcgagaaagcaggtgaggcgggcgggcgggcgggcggcgcgcctcctggcctcgtgcgctagacccccagtccgggccccagcctggcagcgacgccgcgagggccatctttgaaccgggcctgcccggcggcggggggcctgtgatgctagcaggattctgggggagcgagtggaggtccctgtagccttgttccctggaacatcccacaatggctggagcccgggacccttaggaggcctggccccgaccgcatgcagaagagcaggcgcgctccagaggtgatcggcagcccagttataaaatgtgtcactcctaatgagcctcgagtttaaccacaagtgtccacttcggtggcttcaaaggacagcaggctagggtgtgttggagcgatgtttcagggagcagccaagttgtcctctaatatttctgccttgctctgcaagcagggcaagtggagagtcattggggatgggggaataaggtggatgcgatcttggtgcaaacctcatctctttgtgtgttcctggaaatcttggggagtcgcctcccagtttttcccccgccccccggcttgcatattctgggagttagatactcccgagagtcaattactgttgtgcatatggggcccagagcttaattagccgtcaagcagggactccttttacgggagggcgggttcttggctggtaggtaaggtaggcagtgagtggtccagggcctgggttgggggttgtcacagtggggatacccagttatcctggaaacttagtagagaaggcagacttgtaagaacctgaaaaggtgttcggccgcactaatttttggaagctgccatttcataggtggacttgaggatatttggatgtatattagcaggggaccaaccagcaatgaatgtaacttttgcagccctggtttaaacacagggacaaacgttttggtattctcttttgagctatgtgtcttcattctgtgtttggtctctgggttgtgttgtttattaaacgtacttgaagattgcctgccaaagtatggtctctgttttcaggacccagagaggttcagtgaatgtttgtagcccacccagcaaggggcataggtagggtattgacatctgtcttctgacaagaagtaggatagcattcccgtggctggactgttccttttcagatgctgtttctggggtgtttgtctccttgtcctcttgccccggggccttgtctagtgactatgagtcgctttcctgaatacgtgctgctctggaaatatccctgacccatctgtgcagccctgcttaggaactcctgatagtgtctcatccgaatggcactgttgggaaacttggatgatttatttaaaaatagcattgatgcgctggagagacggctcaccagtcaggagcacttgttgctcctgagcagcctggtttggtttctggcaaccgcgtgccggctcacaaccatctttaactccagtttcagggggtctgatgtcctcttctgacctccatgggcaccagactcacatgtggtggtgcacagacacatagacaggcaaagatttattggttgtaaaatgaaataaatacatctaaaatacattttaaatagtgttagctgagttttctttatcagaacagcatgtgtcattatgaagaatttggaagtcctggaagtagaggggctggcatgtgctgtgtgtcatctcacgggcttctttccacagctcagaatgacagagctgtctactcagtctcaaccccaggccttttcagtagaggtcatgcctgtgccttcccaggccactatcctctgctagggactgtcgcagtgccctctttagaagagcttgtctgggggctggtagtggtatctatactgccaggccccacgaatattctaaacccagctgtggaaggtcctgcagtgcactgttcactaggccaggaaaagaaaggctttctctttttttttaaattaattttttttacatccccccccccaggtcaccccttcacacaatccctttcccatcccttctctgagcaggtaaccccacctcccagggtatcaccccaccctggcacttcaagtctctgcaaggctttcttatgaaggagaattggcaggagacggctgcagaaaggctgggaggaaggtgtgtttggggagaagcagctagtagtgagagagttctctggcagccatagctggggatcacagatgagatggcggaagattagggtatgcttgccgtgagggcttaccttcttgaagcttctgtgcatcatcctaggtgaacttgatgtgcagtccgccacatgttctgtttggttgtgaagtggacctgctgtcacgcatgagcgatggtgtgcctggagggacacctttctttattcagccaggtgacaagtctctaggtattacagaggagcccacacccaataacagttgctgctgtttcctgtgcttcaaagcaacagaagtgtttccaaaatgtgcctgtgttctctcaccctcagaaaacagactactgagttttcttctcggggtttgggggtggggtgggagtctaaggattttgagtgagcagaaatcttacacccctatcctggtccttctagtcagtttgccttccctgatcactttcacttacacctctgaggaggagcctctggacctgtcactcagtcatcctgcagccctgcctgtggcagtcatcagaagtcagccttcgtggaggtgaggaaggcagcattagtgctcttcctctccaagtgcccaggaggaccaggacagtggctgggctggcagttagatcaggaggaaagttgggatgagggcatactgtggtcaggggctgaaggagttctctaggagaccactgggagatgtggcgaggtgaggcaccctggggcctatgctgctgtgcttctgcttgccctcgtctcttccagcaaagacacgagtgacgagagtaggtgcccccacatttctggaccttaatgccagactggcactaatcagctgactctagcccactgggccatgtgcgttcccaagaaagagaagagctgtcggtcagtacttaaaaaccaggagatagctcaaaaccacacatttccggttctcccaagactgagactcttgtaacccagacctcactcctgtgtgtaccttcatgtggagctgggtgggagctgcctgccctgggtccctgcccttttccctgctggacacatcaccgagtccccttgtccacatggaccgttgacatttttcagcttgactcacagagatgattctcagctgtttgctgtgacctgtactttgactcttgccccattccttcattgattggttcctcaattccttcatctggcacggatggagcacctgctctgccatgtgctgtgtgtagctctggggattgggacctgccatgaaggctgcactgtcccgtgtcccgtgtgtcaggctgaggagactagaggattggagtcagggtgttagtggtgactgtaaactcctactgcaacaaatggagatttcaaggatcgtgctgaggggcagggagtttccttgggggagtggctttcagggtctctgcgctggtggagggaatccctgtagctccactcagccctacccctgcctgccccactccactctgcttcattccttcagtcaccaaccaccttgttcctgggacagtggggcctccaggaattgaaaggtcctgtggtgttctaatccctttcctccctctctgacccagcttataaacttcatcacgtaccaaactatctggccagtgctgtcacccaggggctgcagggaggtttgctgggactagtgggatggccactagctccctcaacacacccactgacagaataaacatgggtctcaaagtccatgtgctgtgcttttcaaatgctcacaggtaggcttgttacagacagaaagggaatttacagtggaacttgttactatgtatcttctcagagcagatactgaaagtcgggcctgtgcactttcttaatgggcagtcactgggtactgacctttcttaaccaatcagcttctacttccctttcccataagttaggagtctctgtggtttcagtgctttggggttattgacacaaattctgaagctccatgcttcttcactggcctgcctagtcaacgtttcctgtgtacctcactggcagacaccctgtcatgtcccatgttctaggagccctctggaacatgggcttcccaaggcagtaggccagcagtaacagcaaaacagggctgtctgtagacacccctctttcacttcagctttgtcacagctggaggtgagggtagcgatcgatccatgttgcacctgtggctagcagaggcctggggtttggttactgctcaagatcacagtcttagggaagtaaaatggggaactgacccctttctatctgtaagtgacactgtagtatttcagtgtcaggagggacatggcagtgtctgccccaacgttagtttatgtttctacatttcttttctcatcttagggaaaagaaatggcctcaaaccaacacattagttaatgtagactcaaccagactctggggctgcttatgatttttgtaatattgaccacatttacagcactatagggaggtaagagagaatatgtgttaaaatcagccacagcagacccccgtgtctcctgacctcctgtgcagctgttggcaggcagtttgaatgggattccttgtagccaggagacgatagcttggaaagatgactcacgtatgagcttgcagaaaagtcatttcccaaattagcccagattgcagcttgctcttagtgcaggctgggtcttacctcagtccagccaatgtgttgcctgttgccatagtaagatgacacagtggaaagaggagaggcctggccacagtgcgtgccacacccacgtgacccccacccctgccttgttgctgggacaggtgttccactgacagtcagtcacccactacaccccaagggctgtattatgggtaaacacaccccagcctgtgaattggaaaagagctgtcatctactgggcctgtcatttgcttggtcatttgagatcatctgaaactgtgtccttgggtgattctttccttctcagggctctcatccattagctcctagaagggctgggactctgaaatgagtgtttcctgactgctgtctaagacagcaggtcctcttcatccctaagagaacagttgcaggtgactgggaatgtagctcacatctgtgtagcctgcacaaggttttgatctcagcactggagtaacactagttggggaggctgccttgaattcaactcctcttgtccttgaggctcctcagaggtccgtctaccaacagtgcccaccacttcccagacggcctcacaagcttcctccaccaaagttggcctcatgatgcctagtgctctcccttcccgagcagatagtaaattcctgggaaagacatcacacaatatttgagtgagcagtggtacttactgtttaactctttcagaatccagagcccaggttcctggcaagttagcaatcaacaaagtcttaactagatccttagctcctgggagggatatgcatgtccaccactggctggctactagccagcttagcgcacagtaggtactcagtccagccagcttagcgcacagtaggtacccagtccatacttactctaaggaagagtgatgacctgggcatggcaaggcagtgcaagcacctgcacaaggccatgagttcatccccgcactgctgatccaagggaaaggcaaaaagaaaaagaggtaaacttagtgtcatcaccagagccttctacatgccaggcaaatgccaaaccactgagccacaccccagccctgactgactttacatgtagcgtcccctgggtttagatggctacctaggttgcttcttggcaagttggtaggacgtctctgaagaggggtgtccagtggatggagctccgcgctaactgtgtatgttgggcagggtttgtgcatttggaagttgatgatagcgctgcagtcagattcccaagctgctggggaggcagaggatagagggactaccaagggacatcctgcctcaaagagccctaaaagcaaagacaaaacaccccacaaattccggagtctcatgtggtggtgtgcctttatcctggttttggggagtcttgggtaggaggatctgttgtgcctaggagtttgagactgatctgggcagtgcagtgagacttcatctcagaagaagccaagggaaacaaagaagcgtgtcatacacagactctaggcttggggctgcggagggggctccatagtcaagagctctagttgcttttgcagaggtcccaggttcagttcctagcactcacatgatggcttatatctggaactccagttgcagaggatctgacacccttctggtcttgggcacaatatgcacatgatgcacagacaaaacacccatatccatagataaaaaataagtaagtcttttaaaaaacaaaaataagccgggtagtggtggcgcacacctttaatcccagcacttgggaggcagaggcaggtggatttctgagttcgaggacagcctggtctacaaagtgagtttcaggacagccagaggtacacagagaaaccctgtatcgaaaaaccaaaccaaaccaaaccaaaccaaacaaaacaaagaacaaaaataagaccctaagttcaagcctcccattgcaggagaaagaacatgttgtcagagtgttaggccagggtaaggcagggacccatgtagcctggcagcatgcactccgagcccctgttttagttactgcttgctctgcacaggagcgaagaattccgggtagtgatcacccctcatagagcaatgactgtgctggcctttaccagcagtggggccaccaacctgtgcaggttgctacccataacaagtccctagtaggtgccctgctggctgcttgctaagccttttcagttgtccttagaacattctttgggagcctttctcagctgtatttatgggtggctggaggtacctgctgtcctgaggggccggagaaggtggactctatctcccttttgtttctgacatggggcctgagtgtcttacacgagacgtagtgggaggctggcctggtggcctagacatcctgggtctgtggtggtaattcctccttcagccttttccctattgtccgatacacaatgcagagtcctctatgctccctaccgaacacatttctgcccctctagctagcccactgcatccattggccctaaatgactctctgctcgcccctgcctgctggaaccacagtcatttcactaccaattaagttttgggtcagagctccaccctactttgaaagcatggaaatggagtctgctggctcagaacaagagtccatttcagtacttaactttgtagtttcaaaaatattttgtgtgtctgtgtgtgtacctgaactcacgtatgtgcactgcatgtatgcatgagcccatagaagttagaagagggtgtcagataccctggaactggttgtgagctgccatgtgggtgctgggaactgaaaccaggttctctgtaagagcagtaagtgctcttaaccactgaaccatctctccagcccccactttataacttttagaaatgcttgccattgttgtagtctggcaggtatggcttccaggcacacagcaagatggctcagcaggtaaaaggtccttgtctccaagtctgacatcatgagttcagtccctcccagtggtggaaggagagactcgctcctacaagttttacacctccacatgtgtgccatgtgtcctctgaaacacaaataaatgtaataaggattaaagtgaggcagagcaggagggcgatgttcagggttctgggaggtgcgtgtggagggaaaaggcagaacagctgaggtaccgtgcacttcactgacctgaaacaaacaaaggagattcctgattagaatcaatggcagtatttatttgctagttatagatagtcccatgtggctgtcctccgtcaagtggctggctatgaacagataaatggatgattgtgtggggccttggaattgatgtctctcagcccttcctttcagtaagtaaaaataatagtagcagctaacagtcattaggcattcaccacgtgccagtaccaggctctgccgaaagcattccacacatgtgacttcatccccagagtggaggaaaggtactgtactgttctgtggagtactccaagctacaggctgttcttggagatctggagcagttaaaatgcacactcatacagagagtggggcagaggtaaaagcccacaggcgtgcacactacttccccaggtctcactggttctgagggtacccgtctcttagctctgtgatgtgggcaaagcttgacttatatgtttccaggcacccctctgcccgagaggtggctgctccaggattgtggatgaagggcaacagacagcttgagaagaaactgtcctgtacagggagggcctggagcctgggagaagttactccccacccccacccccagctgcaccccctctctttctcccttcctgtttcctttttgagataggggtttgctgtgtatcctacactggccttgaacccactgtgtaacacaggctgacctcaaacttacagcagtcctcctgcctcaggctttatagagtactggagtcactggtgcttactcctgtgccctgttgagatggggaccacgtagcctacgctagtcttgaattcactatacaactgagactaaccaaaaacacacctggccattctgccttctgttcccagttattgggcgtgctgatggtgttgcagtgaggctgacagccagcaagccccagggatcttccctctctactccctcaaccccacggggtcctaggtttgcacctgggccacatctggccttctctatgggtgccagagacccaagctcaggtcctcatgcttgagcagcagatgttcttactcaactcctcagcccacagatgtatgcggaggcctctgtagcttcccaagtgttgcacagatacaagcctcttttgttactttaggttttgttgactctgtcttacctaaggtgttggggctacacaacattgttccaggtaagggaggtggtgactagtgttcactttctcatttgtgccagacactgtactgcagacagacaggcgcttgcttgattctcttcttactaaagagtaagcaggctttgggaccagttgacagctgtggaaaaggaggtagtgttgggggaggtacctgacctgtaggcacacactgcagggaacctgcttttcccttccctgcccccttgtatctagaccctgggttcaggactggtctgctgagtcacaggggtggctcagaggcaccactatgaccttggcttggaaactgctcagcttgggactcccctggggctttcctgcatctccacaggactaacaccacacatctgcctacagacttgcaaatcagcctctgggtcctcagctcggaagggctgggaaccctgcagaaaagcagcttgggagtggagtggccctgggggtgtcaccgagtacctagcagcctgccctccagaagtccagggatccattagccagtgcctgtgtgcaggaagctgagccgttcctatatatccctctctggtagaggtggagagagcctgagcaggggctacaagaagatccattctccttgggaccccaggactgcctcagtgcagtgaagtcagtgctctgtgagctgtgagatttcttcatttccgtgggtctgccatatagtgtgaaggaaatcgtctataagctttctgatacttcagggttcttgctaagtctgaacacttgagaagtgcagagtggacatgaggctcattcttatttaaggcccttctgccctaagatatcatgtatttaaaaatgttgatatttcgtacttcaatcctcagaggaaagggaggtccctggctcttgtgatgctttggagtctctgtgctggagatgaagccctggacctcacagaagttgaacactctaccactgggccacacccagcccctcttcccctgcttcttttgggagaccgactcccaaggttaaaaattggttagggatggttatagttaggccgcaggccaagaggagcgggctctcgttgtgttcagtcacacatctggccatgctgttgatcattcagatctctgtaacaggtaatttacaaatgactctagtgccctgtcaggggaatccgtgccctgtattttcctcccaaggttacctgtcccagctacacagactcaggaatcccgtgtcctgctctgttctacgtcttcctgggccagcacatgcctcaggcacaaagcactgaactgtctccaggagatgaagctgttcagccctgacgctcatcattgggtcttggagctgcaggacctttctcctcattagcattccctcagttgtctgagcttctgcctggacttgtccagaagcttaaacacactagttctctgaggtcatcccagaaccaaaggccgggatcaaaagcatgctgttctgcatggtctggccttgtctctcttcgttaccctaaacaggcttgtaggagctgttgtgtttgaagcataggagctggggtaggaacctgcactgtacagtagccaaagtcctcaggtcccagcttaatgggatgacagagaggtcatcacagaatgtgaaggttattatcaccactaggctgggaacggatgtttccagacagtgcaaagaatgggcctagtgctgtagatcctctacattgtctatgtctcctctgtgaaaggaggctgtgggtctgtgtagggtctgctctgctggagcaagtgtggatggtcattccccaaggaaacttgatactcacatgctatctcttgctgtgaatcccccctcctaagtgatggagcatttgtgaacactttggctctttaggacttcatgtctcctagttcagccagacttggttcaagtagcagtcctcatgaagccctgagtgttgttagcatcccaggagtggtgcttcaacatagccaggtctgtgtgggcaaagagagctttcttctgagtgagaatgctctaaacctcacactgtaaaactgtgtttaacataagcagatcttatttaaccctaccacagtcagggtgcccagccattccactacccaaggagaaactccctgtgaagtctttgggtcaaacttttccagccttggtgaccaccaagctccctgtggaactgtgacctggtgaccaggtctgtgaacatggggctcttcactctgtactctcagcttgctgtatttattgtgcttttttattgctttgttgtattccacttgtagtattggcttgtttatctgttgagaacttgaccttggttagccatctctgtgtttctcggaggaacagataaaggatggcctgggacctacaaaagcagctcaatctttaaaaatggacaaaacacttacattgacatcttctcaaagaaaggtgaaaacagccagtgagctcatgaatatgcacagaactgttaatcaccagggaaacctattcaaaagcgcagtgagaacacgccccaaccagggatggctcacttctttctttcgttctttctttcgttctttcgttctctctttctctctttctttttcttctttctgtctttctttctctttttctctctttctctctttttcttttnnnnnnnnnnnnnnnnnnnnctgcctctgcctgagtgctgggattaaaggcgtgagcccccacgcccggctggagaacatcttgcaaaaagtaaaaccttaaattggcaggacgtgaagtctaagaccacaagactcaccacacaatacaggaagcagggtcttgaagagaaccctcccagtccctacccactcccttcctcaccccctcccttctctccatctctcctcctccctcccctctatagcagcactactcattatcacctagaggtagaggcacctcagatgctgtacaggggtgaatagataaacaagctgtttctctccattgtggagtattagtcagcctttaaaaaagagaagtgttgtctgaagtgctactctgtagataaaacctgagggcattgtgccaagtgcagtaagaagtcagcgaagcaagcaccatgtgacttcactttcatgggatcttaacttggtaaaaatgagaatgatgaagccgagtggtaggggctagctgaggggagaggtggagttggtggttaccagacagtccactttgcatggtgaagatcttgtgtagctggtgatgatgcagcatggggtttgtggtggatctaagcatcgcatggctcaggtagtcactttaaacacattttaccacacttgttttaatggcattctgcccagagccctatcctcacactcataggtttcaaactttgctatggatacaaaagtgttagcatttatttacctaaacatatttattcttagatgtagctttacacaataaattatgtcaaaacagttttaaaacagaagtgtgtagtggcttcattagtgaccacgtgtactgcttgatgggctgagagggactaggtaaagggccgtctgggtacagtggctcctctgttgggtctagcccttgaggaacctgtgtgttcaggaacccttgaagccagggcagatactagaccactggataaggttcttgctaccatgtatctgggctttccaactctggtaggccccctcccagccccctcctcagggtcaggctctgagtcaagctatgctcctggttaatggaagtttcagggttcgagtgtgtagctgggcttcacctgaggcttgccgtagtctggcacagagtgctgggtgctgtcagcagttactgaagcccagacttctcagggtgcacactgggcaactgttctggttgacggtgcaggcggcaggcactgtgaacctctggctgggttccaagctcttggccacattcctaagaaaatatgactggctcatgggaggggcagagggaggggaatctagacggaagcaaggccaaggcttcctcagaaattccagcccttctgggcctgttagatggacagtacctctgcagagctcaaaattaagattactaacttagtctctggccaatgggtatcattacaggttcccgcagtcctggtccctggtgataagcaggcaaatgtaagattgtttcataacacttctcaggaaacagatactttagcagagtggattgtaaaacagcacacttggaatccaaagttaagcttcaagaaagtatatatccagggacacactggagcgtgatgacatcttctgctgagttcccaagtgcctgttttgtaggaactatgtcaggaggggcttggatacctactcagatctgagctccttgctactggagcccaggctggtgctggaatcacaagtgggtgccaccgtgccttattgagacacagcggtccaagaattgggttctgatctttgcttataaatgttgccctgctatggcttcacagtaagaaaatcagtgaaggcccttgttcatgcagaccttcacaggtgaagtgttttctgctcctcttggcctgctcccgatttcctcagggttctgttccagaaccccaccctctcagcatcctggggcagataggaaatactgtcacaaacatagacacacagcttgtattgcagagggaccaggttcctctgagagaaccagctcagaaatataggcttagttctagagggttctcatgagagtctgaaatctccactctgttcttcccacaaacatttgttatttccacattccttttactccaagctggtaagcatcgcaatctggaagagttggatttgaaaacattgaatgtgtgcagacaactagagttcatcctcctaggaggattaggcaatcttaacttcctattcttggagtagatggagacaagaataggatttgtgtcaaattaagtctctttttaaaaatgtttgtaatgctcttaaaaacatatagtagtactttgagtgtgcgtgtgtgtgtgtgtgtgtgtgcgtgcgtgcgcaagtgtgcatacacctatgcatgtggaggtcagagaacaacgtgaaggggtcagttctctccttccatcctgtgggtcctgaagattgaaatcaggctgcttggatcatcagggcttcagtttgatacctaatagcaatactgctgtccctcctggcaacaacggtattgggagggcacaagtgtgcgactattgtcattctgctgttctaagggcagcttcctactgctgagatcagacccctgtgcctttcccgtacctctccacaggaacagtggctagagggtgcccttccccagcagcatcgctcaggaactcattagaaatgggtgacagaatgcagccctgatggttcagatatctcatcctgctggcacatgggagagcgaaacagaagccctgcctatcactaaaacacaccctggtaatgtggaaagtggcttgaaacattctcccaaagcaattgtagcctaaagatgattatgagagtgagcagggtgagcaaggcttgctttccttagtagactacagggagaactcggcagctgtccaattagctctgacaagaaggtggccaggagtttagccactgtgaacaaactgatggatctcccacttaatgcatagtgtgccttgggatagtagttaattaattaggatgatgtattagtcatgttggtaaacaagacattttaaaactaagcgtgtagtttgaactcagagtttaaattgcattggaagccacacagcacatcagccctctcacagtgtggtggtaaatgctgacaggtcctgtccagatgctcccagaacctcacttcctcccagcccacagttgcaggctcttcaccctcttgatctccagtttggaatgtcctgggcagtctagtccctctagggcattggttctcaacctgtgggtcacaaccccctccacaaacttctatctctaaaaaaatttacattatgatccatagcagtagcaaagatacagctatgaagtgacagcaaaaaaatcattttatgccgggcgtggtggcgcatgcctttaatcccaagcactcgggagccagaggcaggcggatttctgagtttgaggccagcctggtctacaaagttcatttcaggatgctagggctacacagggaaaccctgtctcgaaaaaccaaaaccaaataaaaacaaaaacaaaaacaaaaaatcattttatggttgggggtcaccacagcgtgaggaactgtgttgaaggccacagcagcaggaaggctgagaacattgagctaagcagtgcctttccccagatgtctatttcctgaccctctttttccctggtccacagccaggcatcagctgctgttgaacgtttctccatgagtgtggtcttaacctgtttggctgctatgatgaaataacttaaactagatgtgtcttatagacatctctctctctcacaggctcagagctggggagggagttcaaaactcaagccttctttgaggtgctttcttggctatgtccttacatgaaggggccgtgttgggagcaaggaggtagatacacattgttggtctaacaaaagttgtattttattacgctgatggtcatcacacaagattcacattccaaattcctaactatagtcttaagcctttgttcccaaagctgatgatcaccagtgtgacatagctgaaggtcaggcccagtttctaacagaagtctctgagtcaagggtcagaatcctgggggagactgtccaaccgcagggcagatcaaggtgtcgtctctccagatgtgcagagcagagcacagttggcatcatggggctctaggactgtggctggttatcctgagtgagtgatgtcactgggtcctggttctcaggttaccagcagcagtcttggatgtagtggagatcctgactaagctgtttttacatgtctaaagggcatttttttactatgcccatcacatgccctgagtctctctatgaccatacatgtgggctctgtcctcagcaactggccatttcctcgtgaaccacttgaatctcgtgtgagtttgaggtgcataccatacatccttaagagcatagcaaatgtgcccagagttggtgtgccttctctcaagcttcccatcatagtctgggctggtcctaaacttgggattctcctgctttagcttgctgagttctgggactacaatactgccagtcctgggctcattacatcttggatttcatggctcaggatcaaaaggctcagtcatctttgcttcctctgactatcctgggtaattcatgaggctgcacagtctctgtgcagctcccttgtaactggtgacttggtttccattcttgtctcagaaatgtctgtttatcattcagctgttagagggcagattggaccctccttgtgtgtctgcagtcacctaaccctgttttctgcccttagcttgtgccagcatcaatggcttactctttcctgctactcaacctctgcccatgctcccctgactctggaagttaagagaggctcaggggaagaaccagaggctaagcttcataggtgatagaaaaggtatcaagtgttgggcagtggtggcgcacacctttaatcccagcactcgggaggcagaggcaggcagatttctgagtttgaggccagcctggtctacagagtgagttccaggacagccaaggctacagagagaaagaaaccctgtctcagaaaaccaaaaaaaaaaaaaaaagaagaagaagaagaggaggaggagaagaagaagaagaagaaggagaaaaggtatcaagctccctggagcaacactgcccttcagtgggcagattatgggactccttaggcatgccattgagtcagctgcctaggggagaagagagacttcactggcaaatggtgttgggtatgaggggaaggtggcagaggaaggaagaaggtaggaggtggtgtgggagccaagcttcaaaggcttctaaatatcagcattaaagactttgtcccaggtgccccagaaagcagtaagggtgtgagaaggactctgtgtgcgcttagtcccttacttccccctgttcactttttaaaacttcatcccaaagctaggtgtggagtgtatctgtaaccctgaaacctggggggtggggccagattgggctgcatgagatcctgtttaaaaacaaataaatagccttccttccagttctgagcagaactgaggaatccaggcaggcattactctctttcctggcctcacatctagactcaggtcttgcaactgaactctagagaggacagagagcagcttcagagaggcaggatgtctgtggcagccacagtagtttccacatgctccctattagtagtacattgtcaagaggtccctgaagaccagccacctaatcaaggggtctgggagctgagggactgatctttgaggcctgtgcagcaagtaagctaccacttacaggttgtgatggtgtgtggctcccttctgggtctaccagggagaagcacaattgcctcattgggagacctcctgctctctggactgagctcacagtggcggacacatgctctgcagaaacaaagcctgggccagctgcgggtcacactccccagagactcggctacaggttctctgccatcctgggaactgtttgagaaggacatgtgtcactgaagtgggtgggggcagtcttgaggtttcaaagtctaccccattcccagttagtgatctccctcactccctccatgttcccccacccccacctgtgggtcagaacttcagcatttaattgctccagtgccatgccagcctgcttgctgccctgctccccaccacgatggctgtggctttctgaaactgtgagcctgagttaaatgctttcttttgtaagtcatgtggtcatggtgttttgttacagcaatagaaacataagtaagacactaagtttccccatttcatggtaatgatttgggcaaacttggtgattcttgcctttatagaaccccctgaggtggcgaaaaccatgaacttctcttaccagaaaaatgcatgcatatggcttaacactttagaaaagaaccttcctttacatatccagtactctagtctgtccagtgttctggcctgtccagtgctctagtctgtccagtgctctagtctgtccagtgcaatagtctgtccagtgctctagcctgtccagtgctctagtctgtccagtgctctagcctgtccagtactctagtctgtccagtactctagtctgtccagtgctctagcctgtccagtgctctagtctgtccagtgctctagtctgtccagtgctctagcctgtccagtgctctagcctgtccagtgctctagcctgtccagtgctctagcctgtccagtactctagcctgtccagtactctagtctgtccagtgctctagcctgtccagtgctctagcctgtccagtgctctagcctgtccagtgctctagcctgtccagtgctctagcctgtccagtactctagtctgtccagtgctctagcctgtccagtgctctagtctgtccagtgctctagcctgtccagtgctctagcctgtccagtgctctagtctgtccagtgctctagtctatccagtgttctggcctgtccagtgctctagtgtatcccatgctctaggctatccagtgctctagcctgtccagtgctttagcctgtccagtgctctagactatctgttgttctaggctatccagtgcactagcctgtccagtgctctagcctatccagtgctctaggctgtccattgcttaccaccccctcctgtactttgagtgacaccactatccctactgtccatccttcagttcttatccttcttccttccagttggatcagttgatatgcttccccagcatgcctcagcatgggaacagagtgactgttgtgcatgtcatctggtgcttaagcctcattctgaaggtggccagtgtgcatgcagtgtctcagaagagaatcttggtgttcctgggacacactccactgtagtgcctttgtgccctgagatgctctccagctgtgctagggtgtcagcagatgacccagagttttggctcatgagctctgtctcatgtccttgagcatatgcaggaccagcctccccccaccaccccaccccacccccatggaacattcccaccaggctccatgcttccttgtattgttgtagctctctccaggagggaaatgaccaacatcagactttcctcccccccagatgtacacgcacagagctgggtgtcagctcctgggcaacacccaagagccctgagttgtttctttggccctttgagggtacccacactggtatctcctcaggaccaacctttccttcttgagccatttccatcttagcatccttgcagtgagcagtgccctgcacaacccagacttagatttattctgcatccagcagtgtctgagggcagcagaggggagggaatctccctaaaacattttaaactgtaggccacaatgttatatttctgatttatgttgcctccccaatcaaaccatcattccaatgtgcagatatttgcaagtgaagtattagtttagttgtgtgatggaagtgatttatttagcagtgcagcagtagatccgtgctccaagggctggcccttgagaaggtaaatcattttcttccagttgtagccaaggcttgtagtttgtagataatcccagtgatacctacaacagtagctgttctttattgagagcctactgtgcaccaacactttgtaacttctttttttttttttttaaagatttatttattattatatgtaagtacattgtagctgtcttcagacacaccagaagagggagtcagatcttgttacagatggttgtgagccaccatgtggttgctgggatttgaactctggaccttcggaagagcagtcgggtgctcttacccactgagccatctcaccagcccactttgtaacttcttacttagcctttacagcagcctttcctagggtggctggctggcttgattatatatgcacttgagaagataaggtttagaaaggttccctttctcacagttcactagccagaaacacactcagacctttaggccaggccagctgccctcacagccagtttctgccgctgtccttcctctgtggtgaagaggaaatgagcctttttacgaggcaaaggtgaagattgatcaggatatggataaggccttctcaggagctgtgtagctgccatccctgccctgccttcatgcagtgtgaaagaagctgattggagtctgcctggcctctgctctttagtgtagtttgcggtttgtagcaccaccatcattcaagaagtaactggtgacccaaggccaagaagtctggttgggctcagcatgaactcccagggccttctggtgttcgtggggcatgaggaagtatggccttgctggctgtgaatagagccttccactctgctgcactgactttagtttgctttggtattcgagacagggtttctcttgttccagccatagctggcctgggacttacgggatcaccctcctttagtctgtcaagtgctgaaatcataggctggcgccatcatgtccaggtgtcatttggattttgattcgtcctgtgagcatctcctgtgagcttcctgcatgggaagtggcagccagtcttgactgacaagcatatttaccttttgtgatgttcctgggtacactctctcagactcagcaattcaggagggacccttaaacacagactcttcagcttgtctccctgccccactggagagagagcacaggcttgagtcacttgaaaccagggcttgaagaagccaccaagtcctcaaataacatgctctcgagaaagtctgtttgctgtgccatcagtgggtgtgttatttggaacttgggttcatttgctcatgaaaattctgccaccaaagtgacagctcagaaacagcaagtcagaacctaaggccagctctgtatacattttgctgttgttgcagttgtcatcgtcgttgtcattgagtatctgtgtgggatcatgggcctgcatatgctgtgacggaagagagcacaccatggggcatgtgtggcaaccagagggcaactttgaggagttctctccttccaccatgggtttctggggtcagacgcaggtggtcaggctttgtgtcaagcacctcaccagatcttgagcccagtactataactgacatgttctgtgggtccaggtatcctgtggacctttcacatcaggtgtctgcatcagtgactttctagaccaggaggagcagtagtgatgcgttactaccaggacagaggagggctcagggtagcttctgtgtggctaactgttctaatgtgggagcaggcaggactcctcactggcttattcctccaccgatttgtctgcatctgtgcatcagggttgccaagcccactttattgacagatccttcttgctgggcagctgcataagctacttgccaaatggtaataaaaaagactttctctaagtaaaagatgttaaagtgtaggtgttaaaccagagcctcttagatgggagagttttgaacatacactattaaacttcacatagcctggaagaagcgaggtcaagtagtgtatttgtagctgaaattccttgagaaaaggtgttcaggtgtttaatgagaaagagacggatgaagttactccggctcattgaaaggtcagatgggttagcaggtaaccaccacttgctgagctgcacactgtgtgcttctacccttggcctgtccattgtgtgggtgcactgtgacttaggtgggggctctgtacatgagggaaacaggatcctcttgtttcttctcattcctacagcaacctgggaaagatgaactggatatagttagttttgccagactgatttttctgaaatgctttctatattgatggaggaaaacccaacaaccgaagatctcagagcgattcaatgaggcccttccccatcctgcttcatttagccaggccattctcccaggctagctggagcagctccggagttgtaaagaactctaagcctttctgtggttataagggcctgcttttgcagtgttgtcttaaggcttcttcagtttgcttccatgccatgtcacccagcttctcagactatgtctgctgtgtaccgttggctaacctggagctggggcttttccatctgacctgctatagctttagagtctgaggctaggagacagtcatgaagaacatgtactaagccttcttcctaagtgggtctggtccagatagagagcaggggaggtggagtagtggtgtgtccacttagcagacagggaaatgaaggctgctgagttgggcaacagcaatggcagagctggtgttgatgctctggctgggcctaggtctggcagtttttccctgtgcctcttagcagcatttctaactcctgctgcgggggttggaataaattagacctaatacccgccttggtttttccttcttttttccccccaggctttatgcccttgttttctagcaaaccaggtaccaccttctccagcagaattgttatccaaacggagtggataaccttccaggctgaattggcattttgtctcctatcacttgcctctgagtggttttccccacttggagccacggtattaatgagactaagtctgtttcctctggccatgttatgaggctgaaaatgagactttaaatagaagatgtgacatatgggactattcaggtttccttactgcacaccgcaaccatcttgacttttttttttttctttttttttgagacagggtttctctgtgtagccctggctgtcctagaactcactttgtagaccaggctggccttgaattcagaaatccgcctgcctctacctcccgagtgctgggataaaagtgtgtgccaccacgcccggcacccatcttgactttcagctcctggatcgcccgctgcctgcttcttccctcaggaaagcagcaggacaggagcacagcccattctccagtccttgctgacctagtgaatagtgatgtcagaggaggctgagccaagggctgcttaatagggtggattacagcaacccaccagaaagggcggtggggctggaccggaacagccctttcttctagtttcctcccagtacctccaaggaatttgaaaggcaggaggctgagaagttttagagtgactgagttcctgctttcctgagggtgtgtcagccctcctggagctctgcctgaggctgctgggtcattgggttgtcctggagatgaatcccctttcagccagagtcttggttcttagtgtcatttagtgaagatgcctgggccgggaaaggggctgtgatctgctggccttaggatgggcaatgccgttgagaaacagaagcccctgagacaaagccatctgtgcccctggaaacaaggtaagaaagctctgctcccattatataagcagctagagctggccttgtctggggggaccctggcccagccaagtcagctgagctgctaccttccagataagagctcagtactccacctttctaaagactgaagcatacattacctcattgtgatacctgtttggctctcaggagcttctgcttctatgttgacaccattcttttgtttgtttgtttttatttggttgtggtgggagggtttgagacagggtttctttgtgtagccctgattgtcctggaatttgaattcatggagatccacctgcctctgccttttaggagccacctggcaacattgttcaattcttaaaacctaatccaagtcagagtttagatataaaggaattggagtattttgttatatttttggtgtaaagagtgttattaaaagctttttaaacatgtatcatctcccaaaggggtgtgtgtatatcccgattacctactttctttctttcttttttgttttttttttttgtttttgtttttgtttttttcgagacagggtttctctctgtagccctggctgtcctagaactcactttgtagaccaggctggtctcgaactcagaaatccgcctgcctctgcctcccgagtgctgggatcaaaggcgtgcgccaccacgcccgactgaatacctactttcaacaccatgatgggggcagaaacctctctcaacacctaccctaactctcagctcagaggggaggagtctggggtcccttaccctgccttagcgacacaggacagctctgtctcagacacctgtgttagtattgctgacccattagcctgaaagctggcaggtgtgccagacgtggcacctgcaggacttggggacaggatctcactgttcaacctgtctgtattggtcctgagttttctgtctcatcaggttttcggcctccccagtgctgggattgcagatgtgcatcacacccatccatctgtccaggtcttgtctaaccctgcagtcggacttgaagtgtggttggcaatccactgtaacgtatgtctaagtgtgtgcttgtgaatggagaagcaacgggaaagaaatggctgggatcttaacagcaactgttggagctagagcatagaaagtttttcagcttaaaagggaaaccaggtaggatgttagtgtgttagttagttcagcctttcggaatctcccttatctgtctagcatctgctgcttctgtgaagaactgctcctgagtgctgctccagtggactccagcttaacaaaatggaataggaaatggggaggggctcgttctggaactcatctttctttggtgctggatattgaatccagctcttgggtcaagctaatcaactccctgcttctgagctgcaccctcagtccttgtccctacttctcttggcactgggcaatgtgggaaaacagtcttggttttgcatagtcaaactggagtgtttgaagagctgtgctgactataattaccctgacacgtttcagcagaatgatgcaattgaaagtgaggtggtgggggggggggggatggctcagtggttaagagcactgactgctcttccagaggtcctgagttcaattcctagcaaccacatggtggcttacaaccatcttaatgaaatccgatgccctcttctggtatgaagacagtgtactcacatgcataaagtaaataagtcttaaaaaagaaaaaataggggaaatctcaacacagcagggtcaggtgttggatccgaggtacacttgttatgcttaacagtgctgacaacacatggcccatactaggcaagcgctttaccactgagctacacctcagccctcctcagtgtgtttttgcatgtttaaaataaaagcaagcaacagctaggtttgcataactagttaagttttcgttggaaataattacagaaagttttgagagttggttggttgtgcttattcactgaaatggaagcagctgtggggccatagctgacagaatgttcaagtgggtggggatataagcagagccactgtgacctgtgctttccaactcttctttccccagaggcagggttggtttatcagggtacacctggaaccaagtttgtcctctcagtctaaagcctttctggacctgacctcagggccatttccagtcccctttcagtgaggtgatgacatccttcctggtgaatgcatggtggcttcaggccagccacacgattggggtctctctgacacactagggaatgggtgaatggatggaaatccagtgtccacattggctgcagttgggatagcccaaggagtttctgacacttagtatcctgtgatggctgatactctgagcagaccctttgcctagagccaaggatgatgtctgagggtcaagccttgctgcattctgaagtctgaaaagaaatcctatctgcccttctgatcagtttgtgggctgggaagttggaaaactgaagtggtgtaatggtatttgagtgccctgactctctgctgcccttcagactcttcctgtctcatattggctctgggaattgtcatgtggacagatacagcagcaattgcaagttgagttgttattgcaagtcaccatgtgggtgctgggaattaaaccaggtcctctggaaaaacagccagtactcttaactactgaatgatctctccaccccaccttcttcctaaaatcccagcagccagtgccaccagcctgatgaatggagatgctagtgatgtacatgtttgcacacagtgtgggtggcagcctctgaggaagggctggctgtgaaaagcttcagctcataggttagttacgtggggctgctgtgctgggaaagaactgggcagccagaaggtagactctggtgattggctagtggggagactgactgtcatcacagcagggctggactgagaggtttggattgcagccagcagaggtgttagacctgcacacacagtggagaggcagctggtgaagctggatatccatgccccaagtcataaatgtccatccagaacatagcaaggctcagagccttactctgaccactgatcgagctttacgttcgcaggcctgcttcctggtctaagggaaatgagcaatgagggaggcccttatagtgtgcaatagctttaataaatgcatactgcttgtcagaaatgcttgtaattattgctcactggaaagagccctgcgtttactgggtccatgggcatagaacttaggttgactctcttgcagagccatcgtctcacagagctatgtgaatttgaataattctctaccagtgtcctctcaaagggaagatatgatgacattcttaaaggaccctttgggttagtcctattgtccctgtgcccttctcatcattgtttatggtgcagtctcacagtatgctgtcatactacccaagagactcaattttcccttagcagctactgttttcgtttttgtttttccagttacacagtggttaagagcataactttgaactagaatgtcagggttgaattctcattgcgggtcaaatacagagagtgtgccttttactttagatgaaataatcttacattatttgttatcctgcacatctcctggtgctggtgggaaccccggaccatcacccttgatactacattattaaggaaaacagtgggaaccatggtaaaatacagaaaaaacactactgagttcctacaggacctaaaaccttataagaggacagaagccttagttgctgctgttgttttccagagccttgcacatgcacacacccacggttttccataggcacaagcatgtgtgtgtaatttccccctcagatgtcaggcttctgtgtgaccccatagctatgtagtggtggtggcatgctatcatgttaatgttgcacactgttttaaattagccatctgctgttgagtacagaagctgccgttttggcagctgcagatggggcagcattgaggagctccaggaccagagctgggtgatgctgctggatggtttccttaggataagctcccaccatcacattcccaagccaggaacataggaatagctttgaggatctcgccgtgctgtttctcaaaggagaggcatctgttcgtgttctcccacgtgagacataaattccccagttggtcagcagctcatcagcacccatgtcccatctgtttggagatttctcgaaaatgtcagctgtacttgtagtgccacagtgacgggtcatctgaggagagaccatccagggctggcagcagcagtgagatgaagctgcggcttacagtgttctgctttgctttggacttttcttggttgctttggtttgtttaaggatgcacatttattgccattaccttttattttctatcttccaaagagtattgatgattaaaattttttctcctgttgaagatgtagaatgagtcaaagagtccctacattgttaatgctgggccaactgctgggtctggagatgtggaggggcaaacaacccaaatggtccttttcctaactgcttctaagtgatgagacaccagctctgcaccgcagataaacagagcaaggtgtggttatatgtataataaccatacagtaatccatacagaatgctgaggcaggagggtcttgagaaggccaacctgggcaacataatgagacctggcctataaataaatgcatcataataaatggtcaaggtgctcttaattagccaactcatgtagtacctcagaatgtgactaaatgtgatggatgaggaagggtcagagcgagggtgaaagccatgtgtggtaatatcacaagaaggttcaggatgagaggaaaccttttaaaacagaaggttacataggatactttagaaatcacatgccttagaccaggagggtaaaataatctaaaataattatctaattttaacaatggaagaaccaggtgggatgtgaagtcttatagcttgtatcttttgttactaatgttataacagggttgggacaatgtatgcagtactaataggaaacagtacattgtatatcatatgcttcatatttaacatgatatatgtgtaaatgttctataacatataaaacagtttacatggagagtgtgaatgtctataaaatacaatgtatagcatatgtcacatgtaccatatgtaacacagcactgtagcatgtgtagcagtgaccagtaacagctgggatatggtattaggcaatgccagtggcttcctgtgtgccaggtgtggtaccaaaggattgacattcgagatgggttctttttgtacacagttggcgtgtaactccagccttctataagttggatcttttattcagcagggatcagttataggggatggaaactgtaagtgtgaaggggtttttctcatgagaagtgtgggtgttactttgggtgtgggtaagaaaagggaaggaaacttggctctgtcatcagatagctccaaatttagaacaatgtctgtcctgagccactggctgtagagtgtgtttcaccctgggaacgtgcgtaaaatacatttccggatttcaagattccttttccagctgtgtagaggctgttgccctaatctgctgtgattgcagtggccatcagccacccaagatcgacagttactttccagggattgcttgtaagacttttaggaaccctgaagaccatagacaaaagctgagaggtttgtcctatagttcatctgtgttagggatctgaaaacataaaggaccaggtaggtaggattttagaataagaaacaaaattcagaccattatgtaggtgtttacataaacatttagaaatatgaaaacccttccctgtttgcaggctgctgttggaattctggatgacagaccgtttactaacccctaacctctagagtctctcgggttggatgttttctgtggtcattgctcctctgggagtcagcagcatgccccaccctcactcacacaggaaacagaagaatcttgtcatttccaggccacaggggaaacccacgcagggcccacctacagtgcctaccactgtgattagaatggggccacctgagcccacgtgccaagctttcattgtcagggaggagagatagaggagggaaggctctggaatcttatccagactacaggctttggtgttttctttgccattgaacaggctgaggcactaagtttaatggaaccatgctccctgcaaatgttctagccaaagtaaagtgttttcagtgggagaaaagtctgtttcatcattcccgttacaaactgatgtttagccgtcgaatgtgtgacacaggcactgttctaggctcagggcatgaattgtgaaaacacaaatcactgctgccccctggagtctacaagtttgtacacaaactagtgctaggttgtctcttgggaggtaggtcctgtactggcattgaagcgcggaggacggccagtgcttagggattcctagttttttgtttttttttttaaagatttatttatttattatatgtaagtacactgtagctgtcttcagtcactccaaaagagggcaccagatctcgttaggatggttgtgagccaccatgtggttgctgggatttgaactctggaccttcggaagagcagtcgggtgctcttacccactgagccatctcaccagccccaattcctagttttatataggaggaagacgattgttttttaaaagttttctccttccagcccctgctcccgtaatgatgactctgagactaattatttattaataaatgcctaggccataagctttggcttcttccctgaccagcttgtaagttatttaacccattcaaactagtctgaatcttccacattggctggcacttctcctcagcttcatgctactgacctctgtgctccccagacgagtcttctcttcagtctgccctcattctgctacctgctggcttaccaccatgtcctccggctcctcggggtcccctctgctctcccttggatttcttattctctttcccagaatcctctcatcttcctgccagtgtcccacctatttcctgcctcagctcattggtcatctgcctttttattgacaggggatgctttttaagagagtctctgtacagaaggtagatacccagcactaacggagcccaagtgttgtagacattcatgctagaatgctctaaaaggaacaacctgaggaccttgaaatgggagcccaggagcatcctgggacaagctagactggagagtgacagcatgtgaggccatggagacagctgcagaaatgttgacagggagagctttgggatagggagaatttgggcggcgggcgacctggaaaaagacctggagaaaggcgcaaggatagctcagagtttatatagtcagtgcatctgcagggatgctgctacaagaggaacagatgggggggcctgacagaagttgagctgagtttgagatgtttgtgagaaatctaagaggtagccattaggctgttgagtataaaaatgggggttcacgcctaaaaggactaagtgactaggaatgcttgctatgtaaatgtaaggacccgagagttcaaatcccaagcacccatataaaaaaaaagccaggtggggctgtgctcacactggttaccctagcattttaggggtaaatggcagggtgattgctggggcttgccagctgccatagtagctccaggttcagtgagagccctgtctcatggataaagcagagagtagtagaacaagacacatggcctctgcaagcattcccatatgtgtatatatgctacatacaccacagagagagagggaggggttggggaaggagaggggaagggagagatagcaaactaaagaatgtgggattcaggaaagagttggctttttgaaagttgtcactgtaaaggtctgcaagctcacctgagaattaagctggaaaaggtggggctgagacgagagctccagagcctccagcattaaaagggcaggagagaccaggtaacgcgtagaaaggcttccatgggaactgagaggtaaagtggaaggcataaggggcagatggggtgccttggaagcctgccatggaaagtgtggctgtggagggagggcgctggggtgccaggtgatgccgacctgtgtcctagtgcctaaggactgagacttgactataagtcctggggccttgtcatgtggctccagaagtctgaagataggagagtgaagggagtcacagcaaggagtggctactagacaaatacagtttttccaggagctttgctacacagagcaaagctggcagttgttgaggggaggggagtccatggaaaagtcttgtacagagtgaggtgatggtgagtgagcgctacagtagaaaaggaaaggtagatggtaagaggatctctgctggctctaggagcttctaactgtcacatcgacaccctgactgccccctaaggcaactcctgtggcagtgcctttcacatgctgagctcctacaactctacagctgctagtttaggctgcactgcaggctcctgtccctcaggtacctgcagacagctgccaggactcccctctgtgtctccagcctatcacctaggtggcagacttggggggggggggcagagagggtttctagctccccagagaagattgtaaaattgccttactgacacatgtgggtacaggataggaatgcttagggacacttctgtacacagtacgccactgtcccctgggaactactgctgcatttgagcctgactggaactctcaggtcacaaatactaacatggtctccaagctcaagatcacaggctagagggatggcagtcaagacgccatatgtggtctctagcatctgggttcttttttctcctctctcttgctttccctggtgcctgtctttccctttctgagcacatgaatgtttggtaactgtctcatcacaggcattgatctggagcagggattagcttgctttggcctgccttttagactgcatctgattgggcagctgcacttgttggaatcccatcatggtactgtgtggcttttattatctagggcttttattcccatttccactctcagctatcccttcacttttcctgtcagctgactctcctaggtagccacacaggcctcctccagcttccttgcctacaggcctcctgacttcccctatcctgccttatccttgcatcctttctctctacttctggcactgggccgccttgtgtgtagtctgggattaaccttctctgctcaggccttcctcattctaaagcttgtttaattgacccccctctgctcagcacactgcacttcaggcttccccagggccgaatacaaaaggtggggatgtgtgcagtggggcgtaggaactttggctgcatccctacaagtatatccttgggcaagtcctttcccctctgcttcctgaatgcaagaagaatgtgctgatggagttgggtcataggccactgactcagagtgtgagggctacagtgtgcacacctcagcctagggctgttctcttgcagtggctactacactatacctgcatcctgacctcttcgtctcatcccttcggtcctctgtgcccagctgggtgccctgtcatttagagcagcaactcatcccatttggaaagcagctggggagatggctctgtagtctctgaagagatgacatttgattggatagtagaaatcttggtgcaaacatgttgaatgctctctttgggcagagggagagatgatcagtaagtttggtcaggatgcaggaccctttactctagcctgtatgggagctaaaagctttgccctccttggagataggttgagccttccctggaggagagtccggggctttaacctgccctgctctgagccagccgatgctgaactgagagatgatctttcttccttatgtcaccttcagtcacagtaggtagtctcctgctacttactaatgtcatggaaccttggggagcccactcactgggtcagcccactttgtgcatgtgtcagctgaggagtgtgaggcaaagcatacgaaccactgcttcagtgctcatcccgggacagctgtggtcccagttatgtatagcttctttctttctttttctttctttcttttttttaaagcagaagcatacattcttttttttttttttttaagatttatttatttattgtatgtgagtactctgtagctgtcttcagacacaccagaagagggcatccgatcccattacagatggttgtgagccaccatgtggttgctgggaattgaactcaggacctctggaagagcagtcagtgctcttaaccactgagccatctctccagcctaggtttcatattttaaacatttttattatatacacttcatttttttattttgaggctggagatgtcttgtcccagcacatgtggacatgaaggtcagaggccagatcaccagtctgttctcttacattgtttggttctcaggaatcagtttcaggtcttacagtttccaagctacagtttgtattttgctgagttgcttgcttaggatccagttccctgttggaaaaagggggtagcatcatggagtcatagtccccttggaaagtgtctagagccaccttaacatagagttcacatcagaatcatgagccatggggtctctgtcaaatacttttttattgtttttcttctatcccttgaaatgtaaatacttaagtagctgtgctgatgtacctggcagcagaggcagtaggggtgtgagttggaagctgctctaactatgtaaaaacctttttattagacctgaattctgaaaggaaggaaggaaggaaggaaggaaagaaggaaggaaggaagaggaaaaggaaaaggaagaaagaaagaacgagcattggtcttcatgagctgactggcatcatgctggccctgtcccaggtcctcatgtccagcttgcccttccctcgagatgaggcttggtccctataaccagtagaaccttgacagtgtgtctgacctctgtcttccttcccttctcactactgtgttctggggagagattcaccatgctgcaggcatctgaggcttcccgtccaacacatacaagtgaactctgcgtccagtcagttatagagcatccttatctcctgaaagccttcagaaagtccatccagtggtgggagcagggagttctagacagaggtggctgtctgggagtggaaagaagttttgccatattgttttagtgtgagatgtctgttcaagtctgtcagagtgggtgtcatggggaggatgggcatccctgtacttcatctcctcagaagatgccgtcaaggtcagatctggggtccaaggcctagtttggtggaacttgctccctaccctttctcagctgtgatacagaaggaatggtagtatcctctgtgagtcatggagactctaccagactgagtgctgatcagctccaggtgacttgctttctctagttttgcccgcagtaccctcctccattgctggtcatccctaagctgctagccagtgacctatgtagtggcctgtgtgttttagatggtcccaaacatgggcaaattggagaaggcttcataatgaggtgcacgcagtgacaggaagcaagacaccgagtgggtagttcattagttaatttaattccttgtttcattttcactcagcaaatattttagcacctactaaggggtagtcatactatttggtagaaatcagagctctttgcctgaaccacaggacacagaatcaactgtgttcctattgcatcaaatcttctgggcatggcacatgattggtgtcctgacgcatagaaaaatcgctatgattcacaatttcagtggatgctgtagggcagcagcctgtgggtcctgcctgacccctttgaggatcaaataccctttcacagaagctgcctaaaaccatcggaaagcacagatatttacattacaattcgtaatggtagtaaaattgcagctgtgaagtagcaacaaaaatcattttatggtttgaggtccccataacatggtgaactgtattaaagggtaacagcattagaaggttgagaaccggtgctctagggtctgagggagcccaggttgagaagtgaaaatagttgggtagagacataattacagaccagacaacaccatgaaagctcagagctgagctcagagggctaagtcagggttaactaggtgatggtcagggagcctctggggaggaaggaaaccatgggcataggccctgtgaggtagaggtgcggtggctaagtggtggcttgtcatcctgttggccttgagcttaagggcagtatcaagctgagtagtcttgaagtgtttgaagtggcatgtgtgcccaagagatttattgagagatcagattggtgatttgacagagggccctggcataggagacagcactggagagactcaaaaactcacaggttgagttctgttgcaaacagtttgtgatgggtagtgggacagagttcctgggtgtttagatggtaaaatagaagccaggcaaaggtaggtagagctggtgcttgaacagggctttgtgggtgggtgtagggttgaattggcccaagatttttggccttctagacagtggtcaccagtcagtgagatgtggaatcctagaaacctgttgctgtctggtttatctataagcactaaacagtggttctttttttttttttttttaagatttatttatttttattatatgtaagtacactgtagctgtcttcagacgctccagaagagggagtcagatctcattacggatggttgtgagccaccatgtggttgctgggatttgaactttggacctatggaagagcagtcgggtgctcttacccactgagccatctcaccagccctaaacagtggttcttgaaggactttgtcggtttttattactatagccattcaactgttgtttgtaggtattcatatgtgtgaagtaacagttctttctcagagttcttactttgtggggcttgggtttttagtaggagtagcttgaccaaatagtgtccacctagaaagctgtccctcttgctggcactgtgtctctgcacattctctctaggcagctgtgccccacaggagaactacatagaccaactaaggaggagggcttcctcatggctcatttttctttcttttcatgggcaattgggctcctaatgagaatgttctcattaggaggtcccaggaagcctccatccatgagtgacttgtgtgatttaccaaactgctctgccaggtgtcctcatttggtttaactaacacttgctccaagcagcccatagggtgctgtcatcaagctcttgggacaaatatattatgtactatcgaggctaagaagttaattttctacttatgtgaaaattagttgccagatgtggtggtggagcatcctggggtgtgtgtgtgtgtgtgtgtgtgtgtgtgtctatctgtctgtctgtgtctgtgtgtgtctgtgtgactgtgtgtgtgtctgtctctgtctctgtgtctctatgtctgtgtgtctgacctggcagtgtttgtaagtgatgcgtgaactagtcagctatgaaagaacctacgctgggtctatgctaagtaatggtccctggggtagctgtggcagtgcctacttgcttcttccagttaagagaaactgaggtgccttgcttttttgagacatggttggttttgaacagctgtgtgcagaggaagggtaaaagacattcatgcatggtaccctgttggcctctcagagcaatgaatgacaggtcatcagacctctcatccaggtctgccttctcaaatttcccagtgctgctgagaagtcagaggccagcagtgatttaaattaatatatttaattaataaaatgtgtaagattggttgttttatagtaattttgagtctcagcagctgaattgttgagcttattgtagaccctcattgttacagggctccctttataaagcacctaaataattacagtgtgactatggtgtggcattggagtaaggctgcttgtaagtgacctggcatccagcagtctgatgagaactgccgagtctccagctctcagctgagcactggagcagcactcacagccctgccatataggggatgagaggcaggaacttaactaccgcatggagtttaaacgtgagtttagcagagagttcctgcctcattacctggtgtgctagctagtcttaagtcaacttgacataagctagagtcactggaaactgagagagaccctcaactgagaaaatgcctctattaagattgggctgttaggcaagcctgtgtgcattttcttaattagtgattcatggggagggtccagccagttgtgagtgatgccatccctagactagtgatcctggcttctgtaagaaacaggctgagcaagccacatggaacaagctagtaagcagcacccctccatggcctctgcatcagctcctgccaccaggttcttgctctgcatgagttccagtcttgacttcctccagtgatgaacagtgatgtggaaatataaactaaataaaccctttactgcagtttgcttttggtcatggtgtttcatcacagcagtgatgaccctaactaagacacttggtcctggagacccagaaggtctagagaagaaatgaatgatttcagctagtcatagtaagatgggctagatatcaagttgacaatggttgcaaggtggatttagcagctcttaatacagccaggcatgtagtaaagggtattctacctaggtgggagtgcggccaaataaaggtgccgaataactgatgtgtggtcagagtcaccctccagacccagttcaacagtaaagctggtctgtttcttcaaatcagggattgcaaacggcaggccaaaacctaattggctgtctgtttttgtgaataaaactttattgaaacccagcctcatgtatgtagtcgagctcacaaagccaggagtaactgttgtcctctacttttagggaaacatgtagaacaagtgaaagtattgtcttatatttgggtaccaggagataggaaaatggtctgtaactgggtgagaggtgtttgcagcataggaggtataaggacaagggatgaatctacctctcctttctgactctcagctggagtctctaagcattgtccctcttccccagccttttctctctctttggtccaagtccacaccactgacattgacttttagtgaggaccacaatgtgttctctgtacttcttcagtgaggggctgcagaacagagcagagtccaggtacaaggcagacaaatggtagtttcgaatactgagatcactgtatggcccaatagtttcaggagacagtggggaagaaaaagagttgtcattttgaccatcaaccatatcaaacccaaagtaacaactccctttggctcccatggcatgacccacatgctctgcctgaaagtgaagtctagggcacagggaacacagtgtccataaaacgaaactgttcgtctgcactagggcaggctttatttgcattaattatagatttgatttgatgttgataaaggggctaaaagaatgtagccctgtggcgcacactcgccagttattagagatgactgcctcacacagacttgctcctggctttgaagaaggggaaactagggcagcctctagtctataccccataaaactgatgcccttaatcccatagatgaatcggggagactgtcttccctatacatttcaaggcttcttaactgggctaaaattcagattgacatatacaggttaacaggacagacctgtgtttaattgtgttgtcaccagcgcccctagaataggaggctcccagaggggattcgtgcttataaagcacctgagctggatgggaagacagcaggcctcacctgcttaaaggagaaggggaaggaggaggaagaaaggattgtgggacgaagtgatgggggggaggtcagtgagcgggatgtaaagggaataaataaaatatatttttttaaatcacaaaagaatgcacctattaaataacatcacaaccatgtcaacaggaaacaacaatttcatcaaagccacataagttaagttgttcatatgacttaataaaaagatattggtccatacagttaccatactggccacagaagaaaggaaatatatcatttctatatatgtaaaacacaaaatgtgaagatactatagctcaaagtattttttatcaagaaaattgatttccttagaaataagtaattcactctaaataaataaataaataagagtgcttgagctcagaaaggacctggagcttgaatcagctcctctatgaaggatggtgggtgtcagcggacacaaggatccaaaggggggagccatgttgtgagagaaagttgtcttattagtcagattaaagtctgtcacatcttgaaagtttcccagcagcctcattccagtgagcccagggtagcttctcttccaggatgtagatatgtctcaccagaacaactttctacaaaccttcatggtgttgagtgacagcaagccatagaatgctggtggtggtgggacccttgagcctttcctcagtgacgtctcccgatgagcaacaagcccctagcccctgacacagcctgtgaagctcctgtgaggctcctgctagcctgtgctcccaggcctgtgaggctcctgctggcccgtgctcccaggcctgtgaggctcctgctggcccgtgctcccaggcctggccctctggaacccagcagagctaatgtgtgtgcctttgagctgtgggagctctaggacactgctctgcagcagtgggaaccaagtgagtaagaggtgatgacaccaactgttatagaacattctcaacatgaaagtctaagacaggaatcagcactaggtcctcccttaaaagtggagcttaatagtgacctgtgtcacttccaccaaagacaaatggggtaagacagttctcattaaattgatttttggtttggtttggtttggttttgagacaggcctacatctgtagcccaaatcctctggaactcactgtgtagtccaggctagtttcaaactctgttattccttctgcagcctttcaaatgctgggactacaagtgtgaacccccaccccctccaggctgtccagtaagttcactctgacttatttctgggttaattacagctccttgaaaaagcatagatttcttaagaaatgtctgatgtatgacattgtcagactccataaagtgtaaggtttaagtggtcatttgaagacctttattagctcatagaaacccaaattaaagaccaagttcatagcttctttacatcttccttgcaattccttctacagtgttgtactaggaagtcacctcttctgagttcagagctttagtggacagaattaacccatcttgttcacttttttatcttggccaacaggaaactcagagccaaacacccacagctggtgcagtacatctttctttatgtttctgctattgcatgcttttaaactgttgtaagggtcttgtgttacctaaacaaacaccaccattaggggaagaactgttcttaactgcatgttagctctgcagttgagttttacccagcttctgagcagaagcagccatgtgtgtgcggtacactaattattaggtgagttgcttaatgagagcttgctggctggctagtgaactctgacttctgcgtctccccagggacgaaaccctattgctgttttcatctaggagagtttacttctgacccagagggaaagtgggattggtgcagtccaagactccccaagaagctgtatatcagttgagtcagcttccccctccctgggggagtcagtgccttctgcctctgctcaggcgcagagaagagaggaagtgaccttctgattgtggctttggtagctggctccatctctcctctcggggtagagcgtttgagggtttgcttttgcttttgcatttcctgtgtataactccgaaagcaaagtaggttgctgaaaatgtcacctggtgtttgttattttgcacctagaataacatttgagacccgtgaaacagtgagtcattagggtagtttgagacagagcaagtgtcatctgtgctactgctgtccatatttttctaggatgttagcagcccgttttccatgcttcttcagacatgcatactgctggggttgcttcgcggcagagcccttgtctgacacatgctccgttcttgtctgtgtttcacccccagcatacgaagcaagcaatcaaacaaaccccggtcacatctacacaatctactcctttttgtagcagtgcagagacacagtcactgtgtgggttcaccttcactccagcatgtacacagaccttgcttaagctatagtgtgtttaggaagaccatgggtcagggaaagtggctggaaaggcaattgggctacataccaggaaccaaccagtgagcaggccatgtgcccatctatcagtgggagcttgaacatggccacctagcttccagtagacactttgtgtctgttgggtgataatgaagtcagtaacaacacagattagaaaaggggcaggagaggaaggctttgtaaaacagtaggaagagagttcataggcagtgccttctaacttagtggctctgactctactgagagactgttaagagattgcaggaggggctggagggatgtctcagcctaagagcactgactgctcttacagaggccccaggttcaattcccagcacccacttggtggctcacacccatctgtaactccagttccatgcacacagacatataggcaggcaaagcaccaatgtatataaagtaaaaaataatagattattagagagagagagatggagattgcaggagccatcctgtttatgatcagtgtatgacttgtaagaagtcccttggggatgcagccacacttagagaacccctggtgtaggctgatgttcttgcttcccacatgagaagaggcaagggtaaactgtgtctgcctactgacaaaatgagcgagggactgaagcggcacgcagagaaggagaaatcatcccagcgtccatgactagcaggctcctgtgctgctgagtgcccggttgttatcctggggttcacttccaactgtctggcaaccttggggacacacaagcccaagagtgccattttaaacatcagttgcttgcacacggcccttaactcctttatggggagtgggttctgtctaagcctaagagccaggtcacatgagtgagtggcagatctcttcctcagaggacagatgtgcttctagcacactctgatctagtgtttagactctgaattagctctctgatgacaacgaagaaagcccatcctacagcccacgttaaacgactcccagctgctctctgcccctccccttgacagcatgcttgtccccaacacatgcttcactagctctccaccccagcatagtgcagctctgagccactgcagtcttctgtgtggaagctggtggacagtacctctctcagttctccttccctccctttgctcctcgtttccctcccaggaaagccttcacaggagcctgctgtctagagcaggtctaagtgtccctttctggaaggccctggggaggaagacccacagtggtggtctctcccacactgcagcctttcatctcagtggcctctggtgctctgaggaactgacccaaggctaatttatggcatggatctgagctcatttcaagttgatctttgggtgagaggtgtttagagaccaaagccagacagagctctgttgcagtgtttccagcccaccttccatgactgctttaaaggtaaagagacaggcagcctttacccaaaacactgctcttaaccccttgctaaacaggatataaaaacattactgtaaagaaactagatatttcagtccctgctctgtggtagtgctttagtttgtaaaggatgttggaactaaacattattcatcaggcagcctcaaaaaatcatgcatagcttactgactgataattctcttgtgggccataaacccatttacagattcagaccaagaattttgggtgacttctcaaacatgcacagtagcactttgattaaagtatccttggatccaggatcacagtgccttacagtagtgaatcacagcagactcaggcttcctggaaaaagaggaagtgctatgtttccttccatggtcacttcatgactcctggaaatttccattaaacgcagtggattcaccctgttgtccctgccttcctcccctgaggaaggtctgctagggtctcacatgctaggacagggctttgcatcgtaggagccctgcttccttaagatctggagggactgtgccttgggctgttgagcccttagcagagcctttccttcccagttgattttgtttccctgttaagaaatcccaaggttttccatgccatgtgtaaaatcaggttcctcctagattgtgttagtggggcttgagattactttcttttccaccaaggattcaactagcccacaggtcaggccagccgagggtacagggcagagtctccagccaatggcctgctcctaggcttttctcctggccaattttggacaggttaacatccccctcccctcagttctgtgttgactatctctgggacttccaagaggaaacagtttgcctatgcagatgcttaggtttggggtacactcttgcataccaggaaccctgccattctgacccacctcatctgtctggagaattactgccctagaataggatccaaggacaatatgcatgctttcccagcccaaagcagtactaagcaaaaacggaggctaaacaaacaagtctttaggcaagagggagttccatgacctctttgctccaaaacatgttggtcatcacccactgtcgcagaagcagacctgcaggaaatgctgtgagctgttttgatgctctgacttgtgataggagagtccttggttggccttccttccttgctggggtgactgttggtaggtagaattcgatggctgggactgtaggatggacacatacacagtgctaatgttctctggatgcagctttgttccctgaggtgagaacttcttcgctgtcagacactagctgtctctttgcacatggatcctgctcagagcccttcctcctctccctgcaaccttgcctctttcccttagatctgagtcttcaaaaaaagtgcttatggaactccagggtcactagtgagagctggtgacactgcctatcccaagaagcctagccccttcccagcttggttgagagaacatggaggtaatttatcagagttggtgaataatgagaatcaggccttcccaggtgtctcacagtcattgcgcacttggctatggcctgaacagtaatcattgctcactatagtccaaagcctctgtctccggtcttccctcaggaatggttcgcccttccctgacacctgcatgctcattatggctctcaggttctgggacctgagcaggaagcacagcttgtgtcctgacagttaaagtcccagctcttccaacagcaggaggcgctgtctcaagtaggtctctactgaaaagtttcatcactcagcagcactcctgtagccttctcctctgcttcatagctcggcctatgcagttgactctggggcttgcttgtgacctgtgacctgtaaggaacattggctgtgggaataggtagaccacacatgcaggtgggcaggtgtgtgtgtctctcagggtgcatcttctcacccaatcagatcctgccctcccagatccactgtgtgctggactcacgagttccttccgtgaaccgtttctggatctctctaaagtaagccctttaccctgtcagcatttagctcattctgaacagggggcatttcccaagctggcagagcgtgtggacaggtttccattcccgctcgctccatccggtgccttctgtagcctgaaatgaccagtgtggaattggttggagtctctcagccaagatagactcagtggaatgggccaacccagaatctgtaacactgtttatgaacaagagggatcagagacaaactctcaagtggacgagacaggtttctgctgtctttcccctggccttgtgactgtcaagatgtgaaccttaagactagtgaggccatctgcttcaggagacagcctgcttcaagacaggcctaaagtgtgccatcaccaaaggtgataagtcctctccaaaagacacagtgcaccctgtcctgagacccttcagtgaagtcttcacaggcttttcagtagctgttgttttcagacagggtcggccttgaccctccttcagccattctctgcctcagcctcttcccctcccgctccccagtcactcccagcaggtgtgggaatgtggatagcccgtagcctttactgaagccttctcccaggtgagaggtgggttgggaagagctgaagaagtggggaggtagcaggagaagagatggccaggcccaaggctttatcagtgctcacagaccacacttataattgggaacctggccaacgtcagaaaacccctcccctctctccagccagatgctggcaattctaggcatctctgaactgtgtgttctccccactgaggtttaaaaataaagtccatcccctatccattaccctctcctggtctaagagcagggtgtggcctcagctcctcctcccaagcactctgcctttgatgtgcgccgcggtgagcactgattggccgcctttctaggagctgatttactttcactagcgctgctggccagaaagtctctcctctcaactagtggagacttggttccctgctcagggctatgggcacatgtcgcagacagcttccatgctgggcatatggttcagagaggacaatgaggagcctgacaacagagttgtgtgtgtgtgtgtgtgtgtgtgtgtgtgctctgcacttgttggaaggaaacttttgagttgacccagaggaaataagattcctccaggaacaaaagcagaccccagtccctcccaccactggacttggatctactttgagccatctgcagggtgcgtaccacttttctgctgccaaaccagacactgctggttggcaaatgcaccaagactaccctgtctatccttggttaatcaaggtttctgcttgcagtgagaacacaaccaccctaaatggaggcttcggggctgagtgaggtcaggctgcagcaagcctctgatgggaaacggtccaggccattgcaccacctggactccacgggcctgtgcataactccacaccttatacagtgctgtgtgtttagtggtgttgggggtggtgaaaggtcacacttgactgagaatgaagtgaccttaaatcaatgaagtctggttttgcctaaatcagtgtgacttgtatctataattcaaaagcatgagcccctgggccagttgtgctggctagcacgctgaacacgtggcactgatgaagatgcctcatgaaaggagaggtagctgtgatgctctcggtgataactgcggaaggaattgtgctggctttggccaggaggccgagtctggagctttatcttggctccaggtgtgagtgagtgagtgtgagtgagtgagtgagtgagtaagtgagtgtgagtgactgactgactaagtgagtgagtgtataagtgaatgagtgagcaagcgatgtagcaaatgagtgtgtgaattgtgagtgtgtaagtgagtgaatgtgtgagtctctaagtgagtgtgtaagtgtgagtgcgtgagtatgttagtgagtgtgtgtatgagtgactatgtaagtgagtgtgtgtgagtgagtgagtgtgtaaatgagtgtataagtgagtgagcgagcgagtgagcatctggccatgctactgagtgcctgctctgtggcctgatatagtctgtttctagagggagaagagggggtgtcaggatccatgagagaacagatgtcacatctctcacctgagttctctcagcgtccgtagcagtctgcccgcagtctgcccagccagtgctgcttgctttcaggccctgccacacctagcataaacatggatggagagggcttcctagcccggagtccagctaaagggtccgcttgcattccacagctgttgctgctagtgggtgtgacctagaagcagttacagccagcctagtcctaggaacttccttggtatggaaggggaggtctcagagttgtcctgtctaattcagccatcctaaaaatggctgaacatatcctaaaagtgtgcatagaacatgctggaagtgtaacttccacaccatagtagaatgtacaaaaaaacaaggaagtaactcaggagcagttgtatgaaattgtctgctgggtgctgatattttaggttaaatggggtgaaagtagtattaaatgtaactcccactgggcctctgcccagtaagggcctaaaacacccaccattccctagagacctagaggagatatgagggatagcctttgtcctctgttgcgtagatagcttgaacacatagctgctgctaggcacctctatggtagtacctcagtgaatgcagaaatagttcgggctacagaattcattcacagattctctgtgcttattgatgagcatgcgtttatttatctgttcttgcatctactactgagctaagtgccagaatccaaggtgaataagactttgaccttttggagtctcaagggtcaagtaagtagaagctcctttccctgaccccgaacatgggaaggaaggcagtaagagatggagagcagaatgtggccttagccgccttgaagatcagcgcagtgtggggaggcaggcgagcttcctgatgtggacctcaggtcagaagctttgtccctgctagtgtggaaaaccacactgaagacagacgtgtaaggaacatgtagactgagaactgtgtccccagaagtgtgagccctcccgtgttgctgccagatagcaaccttgccttaagcataaccactctcttgattccccaataatagctgctccttgcctgatgatgtagttgtgtggatgctcatttggtttgtggttttctttgtatgtagcctctttgtgtgagtcatctgtgctgggtaggtaggaataggtggttccttcacatgtgcggtgggattccgttttctgggtgtgcttgtatttacccctctgctgcctcaggcaccctgaaagactactcttcacactctggatgttttgtggtgaactgaggcatagctcccatatacccagctccctccctccttcccttccttttcatttgtcttgttttgatttgcaacaagatcttgtactataacccaagttggtctcaaacttgtagtccttttgcctcagtcttccttgttggggaattacagacatgtgccatcatacctaggcaccatccacataggcatggatgtagtgatgtgtctttatggctgttgtttcctgattacaaatgcagttgagcactgtaccatctgcccattggtcattcagataccacatcttaggagatctctacctcatctaaatctcagtgtaagtttaacccttgttgttatgtaattgagatggaaatagaggagcttaggtgactgggtgggagggtgaactgcaggtccagcctcttcccttcatgtctcatggccactcagagccttgctggggcagcttttggctgcagcctgcctggcatgaaggcagttttccagattccccattcttctctataaactagcaattctatttctcagagcttcattatgcaagcacacagagatgtaggaatgagctgtgtgttcatatgggagtccagccaggatactcactgccttccagcagaatattattcaactgtcaaacaattgtgctcataggaaactgtccataatgcattgctatgtttaagaaaacaaaacaaaacaaaacaaagcaaggattggctgggtgtagggttgcatgcttttaatcccagcacatgggagcaaaagcaagggatctctgggagtttgaagccagcctggtcctccatagattgagttctatgacagccagggctacacagaaaagccctgtctcaaaaagaagaagaagaaaagaaacagggaaaagactaaagacatacacactaagctggagagttggttaaggacatttgctgagcttccagagcagtcagtcagttgacttacaccacctctaatatctagggcatctgacgccctcttctggtttctaaaggcacctgcgcacacacacagcacccccacctcaccccacacacaaataaaagcaagtcattcaagaggagcacttggagaactggcttgtcagttcagagcacttgctgctctttcacagcgtggagttggttccctcccagcacccacattgcacagctcagtcaactgtaccaccagctgcaggtaggtcatccagtgctgccttctgtgtacagcaacacacacatggcatacaggctcacataagttaaaaacaggacagccaggactgcacagagaaagcctgcctcaaaaaacaaaacaaacagacaaaacccacacgagtgcagtaattcctacttggcgataagaagccaggaggggttccgactgtttcatcttcctttcagtgcttggatttgaataatgagtgtttccatgctctgcatccccgggtgtggttatgggatgtttgccaacaccgccttccctctgtcctcacacagatgtctctgtgctgagtaagacaggggtcttttaatgtggaaagtgaaagtattgctttcagttctctcagctggggctgttcctagcctttgattattgagtgttggcagagatctagcgatgttaccagatgacaatgatggctgcagattagtaaatacttgctctaggtcaggtggttctgtagttagtccttttctttaggctcaaagaggtaggagaaagaagtgaaagaggctcagagaggtatccacactagtggtcaagcttgggttaaaccacacccaactccacacagtgtgtcctgaagtgtccatgatgccctctgcccattcagcttcatcccctacagtacagtgcaagatccttgcacacttgaaaatgaagtccttcaagaaagttcttcccagtatcctctggacacttctccccctagttgtccttagtcccctggcaggggtaatggtgttggatgaagtaaatcatctctaagtcctgctggggatgctgagcctgatggaagacaggtagcaagaaccaaaggtcagctctctaggttgactgcaggcactgtggagctgctacatgagtcctatccacagtgaccttgactttgtgatccctggtgtgcatgctgcttagaggcttccatctccgtacagaattaagccctgacagaaactgctgctaagttgggatcccagctgccgcagcaaatgacatttgaaaggccagttgatcgcacatttgtcaggagcagacaaacatcattgctaagcccacggaggggcaagctgaagatctaagaatgaaatcctggcagtgggcagggcactttggaagaaattggccagctttgtgggggtcagtcagtttgagtgtctgctgaagttgatcctgtgagtaggctgtgtgttttccacccctcttctccctaggtagggaacagcagcccatggattgttgttagtggcactgctgtacttacccatagattaaagagctgctcttccagggagagcaagactagcattagtccttggaaacctctgtccattggtgcaaatgccgcacaacaagggactcagccttagcttctgttagtggcctttcaagcctttgcaagtgtagtgtgtgtgtgtgtgtgtgtgtgtgtgtgtgtgtgtgtgtgtgttggcctccagccctgccacctgccagttttactcataggactttctcatgcatggccagaagacacactgaatgtgtctgtagcagcattgtttaggaaagccaaagccaatagcaacccagtgaccatggtaggcgagcagacagaacaatatcacagagaaaagcaaggatgtatgtcatctgagtggttactgtcaggcctatagagagactatatagaacactaccttgtgtgatgatcacaaactctaaagttaaactacacatgtggacgcaaattataaaaagaggaatcacaatccagacaaccatagggtgactacctatatgacaggagagtggctctggcaaaccccactgtgtagctgttcatcctcctgtggctgtataaagtacagggaagcaacaatacatttctcactcttaggtatttttcagttgctgataggacagcatgaccaaggcaacttacagagaaagcgtttattgggcctgaatagcacagttagggatcccgacggccacttgaaacctgattgttcacccatctttccagagaaagctgagcacagtctaattctgatttccagaattgtaatgttggttgtcattacatagcaactctgttcaccatgtgacttgctggtggttttgtgcccactaactggcctgagaagagggaggtattaataggtgcctcaaactgtcaccacagcttcccaattatgtacctactcaaactgtattcaggaccaggcaggcaaaggtagagtgagttctgtcacccacttcctggctttgatggcagctatcaggagtacgtatctctggttcgtggtcagggccagccttgctctcatgttcctcaggggatttttgtaccgtctatatttctttccacgttggttccaccttggttatgagagttggctgcgagtctggccagctccttaaccctgcatctccttacagacccagggcagcagatcccagagaagaggaagttggctcacccagctgagcctctgaggaacttgatcaccacagtaaacccagacttccccttcaagcctgcttgtctctcttctctcagcctgtctgggagctgtgtgctctctttggagtctgttacaaagccagccagcatcagaaggaatgggatggatggactagcagtgactgatacagggcaggtgtgcctcttcctgtaagtgaagagaagaaagtattggtgagccatctaattgggagagtgagcctcgtgtcagtgctggaggataacctgttgaaagcctgtgggctgtatggaaataagatgtattcagagtatgactaaccctgcacccactaaactcatgccttgcttccgtgctcagcagctaccctgtgctggccagttgataaatgaagttataccacagtggacccacttctagttaaaaatacaaatcggaagtgaattttcaggacagctgacagaagtgttctgagcatgtctgtcatgagctatgatggtctgtgaactaggtgcataaaacacactttcaaaaaagactatttgcctatggaattggagacatggctcagtggttaagagcacttttttttgctcttatagaatatttgggatcgattcccaacactcatgtggtaatttacagtaactccaattccgagggatctggtgccctcttctgactcccaccgttgtgtgtgtagtgcatatacttaaacacagttgaggcaaatcactcacatacaaaagattaaataacctttcaaacttaattgatgtgtctgtgtgtttatgtatctgtggagagatggcctagtagttgaaagtgcttgctgagcaatcccactaactccaacttcaaaggatccagtgctgtcttctagtccttgagcatcacacatgcacacacacacacacacacacacacagagagagagagagagagagagagagagagagagagagagagaattaatctttttaaactgtgtttcatcctccagctcacagaatatcatgtagccgaccaccctctctcatgcatgctcacttatatcagcctacaggcagagtcctccaacacaagcccatttgctaataaggcaccttgtctgccgagcgtctcctaggacttccagcctcgcaggtcactgtagagcatcagttgctgccttccctacccagtctgcaagactgcactgacccacatttgcctcagcaccgactgtgctcagcatgagaagcgcagtgtttcctgcatgcgatgtcagtctccatgcgaagggggtactgtttcagcctccgttagagagttagagaggcatgtggtaatgtgctgcccaagccctctgcctccatccagtccgagctctgaaccagctctattaggacttgctcgcaaccttcacgtatcacaagggaagtataaatgtgaatgaacctgccctgtgctgctggggactagggagaaatggaggccagaaaatctcaccatgccacttcatctgctctgacttacaagggccaggtggacttccttccagctagtgttacctctgccctggacagcaagggcttcctgttgctctgtggtacctagcctgaggcagggtttggtttgcctgcgtgagtggaggccagaggctcttctgagtgctatagggctccctggtgatcttcagaggccagagattatctgatcctgcctgagtgagcacttggaatgtttttgactaagaaattgaactttgatcttaagttgtgtgcagcagtgtgacagtgacagtcctgaaatgaagctactataccgtttgtttggagacagctcttaatttagcaaaaattgctggaaatgagggagtatgttttatttttctaaactatagataacttacttccccatggtatacagaattgtgttctttagttttcagtattaagtattacaaatagttgtgagtattcttcctgtgactctctgctattgctgaaagctgcagtactgtggtgtgttcctgagggggtgggatatccagtgactgatatgttcgtttgttgaagaactgtttgccgagcatcttctataggccagatgctgtcagctgcctaagcacacaggtatggccctcagggaactcctatccctgtcaggaaacagcctcataaagatggtttagtttggtttagattagtttagttttgagacagggtttctctttgtagccctggatatcctggaactctgtagaccaggctggacttgaacctagggatcagcctgcctccgcctccgcttctgactttgactccgacttccaagtgctgggatcaaaggtgttacccccaccacctgcgctaatgagaacaataagaaaggtggctgcagactatgaagttgtccagtgaattggttgtttttgtcgctctgttgagatgtcatctgtgtgtgttaatcatttgttcacttacagtgtacagtggaatgttctttagtgactttctggcttacgccaccatcatcagattctgatattatctttgttcttccaaaaagaccccatgtgtcttaatggtcattctccatccttctctgttacctctgcagtcttaggcagccactgatctagattctgtctctttgaacttaactattctggacatctcaaacaaatagacacaagtggtcttttctgtctggcgtcatcacttagcatactgttttcaagattatccctattgttgcaaggtcagggcttaatttcttttttattaccaaatactgttccactggggtagatctaccacactttttatttctatttactcattcacgggcatttgggcatttgagttattttcagcccttggccatgaagcagctagtgctctaaactttcccgtgcaggccttatgaatatttctcttcacttctcttggacatatgcctaccaatagaatggctggaacggtgtgtttggtattaagaggacctgccaggagtttgccaggacagctgttatatctccaaggtcagcctaaaaggctttccgctctcacctagtcctcaccaacacttggcaatacctgttgttcttagcattcctggtggcaagtgggtttatttatatttgcctagtcatgttgattatcttgtgtttggctttttgttgcttttttggttttttaggtgctagggatcaaacccagggcctcctatctgagctcaaatgttgatcatctttttatgtacttattaccaatatgtctttggagaaatgtcttttcaaattctattttgattttattgatttatttattttgtgtgtgtgtgtgtgtgtgtgtgtgtgtgacatgtctgcacgtgtgtggtctgagaacacctttcagaagctggctttcctttccccgtggcttctggggatcgcttcattcagacttgtgtgacagccactcttcctcactgtccccatgcaggctctttactcattaaagtcatttgggtgttttggttgtttgatttgggtctttctgcctttctacgcactttaaggtttggctgctgctgccaccgtgggaacgttttcctgttccggctgctgttgtttgcagtgctgcagagtggagggccaggactgagttaggggagctcctgcccagctgcagccaatgacttcctagtttgtttgattgtttgcctttcttttgagacagggtctggctgtatggcttaggctggcctctaacttataatctggcctccagagtactggaatccgaggcgtacactggctccccagggtgcccttccttcttttctgtatgcagtccctccttggatatagaatctgtaaatgttttctccatccaacagtctgtctttccactcccttgatacaatcattacaacacaggttttaatgttgaaggagttgtaatttatctatttttatttattttactcatgtctttggtgttacatcaaagagtggactcaaattcaaggccacaatacctgtactttctgttacgtgttttaactctttagctttggctttaactattatatttcgatcttttacttatttaaagctcattttagcatgtagtgtaaggttgggaccttcattcattcctttacaagcaagtgcctactttccctaatactgctactggggaatgactctgacttccccattcagtgtctgcatatcctcgctgaaaatcagttagcttagacatgtgggtttatttctggagtctcattctgttcttggattagtgtgtctctatttatgctagtactggagtgtcttgattaatgggtttgatttttatattgagacgtattgatgtcccccagctttgctctgtgtattgactgttctagatcactcctgtttccttactagttttaggattagagtgtcagctcttaccaaaagagttaagctagcaggattctctggaaaaacgagttgttattggtaaatactacttttgtaacaatattaagcctttttgatccaagaacatgggatgctttccacatagtttggttgtctctgagttcagcactattttatagtttatagattatatgtgggaaatttctcttgtcaaatttatgtccaagtgtgtcatgtctgatatgattacgaggttttttaaattttcattttgtgtattcattgctactaatataaaaaattagtttttatatgttgatgttgtatcctgtagccttactgaattggttagtactgatagtttctggtttggtttgttttgagccatgatctcattatgtagccttgactggcctagaaccctcctatatagaccagagtggcctagatctcacagagttctgtctgcctctgcctgtaaaaatgcgccactgcacaaagctgtcatgttttgtttacttagtcgtactatgcttctgggggcaaagcccgggccgtgcacacataaaccactgagctgtctgcctgcccggtgctagcaaagttcttcagtagattgcttaagagtttccacacacaaaacaatctctgcaaatagagagctgggtgtgctactgcataccagtgacccagaactccaaaggccaaggcaggctcactgtgaggccatgttgagccatagtgagaccctgtttaaagtagacacaaacacagagaagtatctcaccttccttctgagcagagtgcctttttctcattactaattaccctgtaagaagtttgcagtggaggctggagagatggctcagcagttaagagcactgactgctcttcaagaggtcctgagttcaattcccagcaaccacatggtggctcacgaccatctgtaatggggtctgatgccctgccctcctctggtgtctgaagtcagcaacagtgtactcatatacataaaataaataaatcttttttttaatctttaaaaaaaacaaaacaacacagaagcttccagtgtggctcccccaggatcagtgagcacaggcacccttgacttgtcttgctctaaggacatcagtcaaagtcttttctcttagaccagaacagtttgaacaccttgcttccatttctgtctttgctgccacctctaggacctggcctgtgtcacttgtactttcctccaccaaaggctgaggagactggttccaggggacttccctgccagtttttcacagccacgcctctcatgggtattcttcctgtttctcctgagcattgattagatgctcatacggaactaacaaggacactcagatggtttaagttactcaccattctaagcacccaaaaccagggagaaactacaacagtgcttacatgtaagcagagtgatagaatgggttccacgcccttcagaggcaggctgatttctgagttccaggccagcctggggggattccaagacagccagggctacacaaagaaacaatgtctcgaaaagaaaaaagaacaggtccatatgtcccttcctttaactctttcaaggaggaagttttagcttgcagactcatcagctacagcttctcctgcccctcctctaacagccaggcctctgtgctttcagactctcagcgttctcatctctcctccttcaccatgaagctgatggacaaattccactctcccaaaatcaagagaacaccatccaagaagggaaagccagccgaggtgtcgaagattcctgagaagcctgtgagcaaagtaagctgcgcctctaagtgttcctcctggtcccagcctgcggccagcgttgtgagctgcactggctctaagtgcactcactggggccatctgtgtccctgggacctgggacctctaggactgctaatcagtccggccagtggcttggacagtttcgtgtcatcctctgggcatttaaagtaactcagagcactgtgctcacacctggtgctgcctcccacccagaagccctcgggtactctcacacagggctctgatggcctggaccaagcgttcagcctcagggcctgggctctgaaactcacaagcccctgaatcccatctaaaagcatcctccagcattagtaacctcagcagggccagctgagccagatgtgtggaacagctgttgattctcaccaacccctccctccagtctacaatgtccatttcaagctctgtaggaatccaggtttcctctcttccaggaggcaagagacagatttctaccagagggctaccctatccccttggatctggagcagcaggcagtagaatttatgtccaccagtgctgtggcttccaggtctcagaggcagaaggtcagtgtgacattaagaacaattggggttgccttgccttccactgcagaactctggtccgtggtctggggatggaaaaacacctgtggtgatgttagcgtgtcttcactgggtggcaactatgggctcaagtatttgtgtactgcttgaataaaagcatctgagtggtcttgatggggagggagctgagactatgcagccaaagtttgggtcctttcaagagaggggtctagtgggttcataggcagatggggaagcgtcacctttccagagtggttgctgtctccctgagttgctgagatgatgtgcatttactgagaaggtttctaaagccttgggaggctgtctcagccagctcaaggtccttagcaagggtgcctgctggcagcagcactggcactgacccggcctcttccctgtctcctgctgagtgctggggagtgggggcctctccgaattgccctggcagtgaaacctgccctgcctaaaaagaaagtctctaaagatgggggaatttagccaaagccacaaagcgttggttaagtcaggatttaaatgcagagcctgactggggcttttttgtggtgtgctaaggatctgatggggccttgtgtatactaggcaaaagctttgccctgtgctacagcagtcctggagtttgtttagttttgtttaagacagggcatggctctctagcccaagctggtcttaaagtgcaattcttatgcctctgcctcctgaatgctaggatcccaggtgtgtgccaccatggccagccaccataggtcttcattaagaagtcgagctcaagccgggactggtggcgcatgcctttaatcccagcactcgggaggcagaggcaggcggatttctgagttcaaggccagcctggtctacagagtgagttccaggacagccaggactacacagagaaaccctgtctcaaaaaaaaaaaaaaaaaagaagaagaagaagaagaagtcaagctcaaatgtgtttgttaatatcttacaaatctgaatgctcatctgaacattaaaatacacttagcaatgtaaagtgagaacgagtttgcagatgagctggaccccaagggtgattggacgcagacctgctgtcataactgtcagcttaatgtggctcacagacactgccctgtctgtgtggacaagcagtgtatcttaaaagtctagttaacgggctgaagagatggctcagcagttaagagcatcaactgctcttccagaggtcctgagttcaattcccagcaaccacatggtggctcacaaccatctgtaatgagatctgatgccttcttctgatgtgtctgaagacagcaacagtgtactcatatgtataaaataaataaatctttaaaaaaaaaaaagtctaaaggtagaaaaagtaaggtttgaaagcccagaaacttgtattgaatgagttgctgcctgtgagcaaggcactgcttggcattatcagatacactactgctatatagaagattcttgagcagagagaggtcttagcatacacaacgctctcttggagctcgcacctttaggccatgtttcctaactggcttattgacaaacagctttgctctgcaagagaatgctgatagggaaatagtcagcaatttgggcagagtctgtcccttctttatgcattgtccaaagaaaagtcatagaagaaaatttgatgtaatcatacttgcgaggtatctgaaagcccagcagtacctgagacatttttagttgtcagttagggagagtgaagcagggactgctgggtatccagcaagtgggcatgctggtgaccatcctgtagcagcagggtgtcttccccaaggccctggatgttcctagtgctgaagtgagactgccctatagcaggagctgcagccacagcctgggagttaaaactcaaccctgcaagtcccaaggctcttgagtgtggactgctgtttagtgcaggccccaggatggaccccgccatagcacagaaatgagaggacagtgtccaaaaaccatgtggtgtagacaagttgctgctgcccgtcatcatttgtcatttactgtctctgtcacctcttacatttgcatgtgtttcatgttatcccacttgtgactttccctgttaaatatgtggggatttgaagcacaggatttcagtgcagacctagacccctgctgcttcctggtcttctctttgtccagcccccgcgcctttggcttcacacctgttgtcttatttgttctctagccctgtggagaaactttgtcacttctattacacagtattgactgtgacccacttggtctaattaagtctgttttatccactctattccacctgtctttccagtctggctttatctagacacagtagtcttctcatagaaaaaaaaaaaaaaaagatcagctcttttacaaccttttagcaagcctagcagtgagctgtggattgttaaaggtagcagagagagtttagtcctgtcctgaaagtccaaagctaaccgtcattatatgaacagttaacagcatccagaagggctcagattgggtgagttccccagcctttgggcacctagatattggctggatcctggggctccactgtagactcctggagggcttccctgttagctctctagaccttatgtaaagcagacagagagatgcccctgctgcaaagcctggcacagctgagctctgttagacatgccttcttgcagaaccactcggtacagagaaggaaagatgttgagttgtctttacacaatcttggttccagttttttgtgtttggctgtgttgtgttgtattgtattgtattgtgttgtgctgttgtaactttggctgtctgaaacttgctgtgtgagcagactagtctggaactcacagagacattaaaggcgtgtagtcaacactacctggttccagcttttttttttttttttttttttttttaaagatttatttatttatttatttatttatttatttattatatgtaagtacactgtagctgtcttcagacgcaccagaagagggcatcagatctcattacgggtggttgtgagccaccatgtggttgctgggatttgaacttcggaccttcggaagagcagtcgggtgctcttaccaactgagccatctctccagccctggttccagctttttatgtgctgattctaattgctccaggcccatgacttggcccatgaccacctgattcactgtcctgcagtgctagaaatacaatttagtttccatgaagcaaaaaggccagggctgcccatagagtagggattctaaaggtcacactggatagctgatgctgctctgaagtgaggcagtagctgaagacagaggccatgttgtgttccttccttttcctctatacctgtcccattgcttagagtcccaggacagaggagcacaggttagcttcccctcacctgtatcccctttactcatttattaattaagagctttgaacacagggccctctaggacacatgtgtgcctgtgtgtacacgtgcatgcttacgtgtggtgtgggtatcgtttgctgtgttatctaggcagtcccaaagctcttgttatctcctgtgttgctggaagcagttgtgtgagagcaggtctgaccatgttgcttaggctgatctcagacttgtacactgcaattatgagcatgccccaccacaccagcttcccccgcactttggatctgccttgtctgtactgtccaggctgtggaatgaagcctaccaggtttgtgttctaattttgttacataggcaggctatctattctacccactccccatgcagcctcaatttctccacttatgaattaatagcatctgttctgtggggaggttacaacctgaatggaaacaagtgcagagctctgggtagcttgaagcactcagagcggcagctatgacttggccctttcctctgcacgcagacttttgcagcctctgtcatcctcctctgagttctcactctgaccccgatgtagtgtctcttcagttattagtggctccctgccttgcccagtcagtcttctcctctgttgttgtttctatgtttcttccactgtttttttggttttggttggtggggtttgttttgctgctggggatggaacctgtgtctgtcctagggtagacaagtgcttggtgagctccagcttcagccacccacttcgacttccttaataacatagggcagatacagtcatctgtcccacagacaaggaatggcatctactgtttccaagtccagcttggccttggatcttgacccttcccaggattgacaacctcatagagtccccaagcttatgaggacacgtggtagcagctgttcccctagagaaggagaggtctgtaggttgacagtcattctggggtgactttataggccagccaagcaggtgctgtgcatgttatgtgtataactgattctgactgctaactacagtctacagcccgaagggctcagggagtgcagacctttaataaagagaccgtcattaaggcgtgggacttgggagacagtacagatgctacctgactttgcctacttagttagcccctcactgagtcctgctggcttggctcttatgtgcctgatttgatctcttcttgtggcaggaaaagcccttctactcccaagtgcctgcactttaaactgttcccagctcctgttcactcttgcctatgtgtctgatgtgttttcttaaaatacttcctgttcctcagcaagatcatcattcttgccttcctgcaggtggtgttgtgtcaagacagccccttctgtttcccccctcctctcctctttttctttctcccctcctcctctcctcctcctcctcctcctgtagcctgactgctcttcatgctgtcactagcgccacccctgtggcctgattattcaggctagccccgctgtgggtatgttaaaactgagcactcttatccaggcagtagagaaaccagtgctcagcctcttagagacagacaagaattgagtgtttcaaatggagatgggaaaacagcgcaaggaaggctgagtagtcctggtggtctgcagaacactccaggaagccataccaggcctttggcaggtctctggctgaagttctgtttacttgattccatccacatatatagaggttttggggttgttttgttttgttttggtgttcctatgaaaaacctcccatattggattttaaatttttaaaattatactccctgacattatctgggggtggggaagatttagtattcaaaagaatagttactttttataatatttctgccattcatgtatttatagattattgcttaagtctcttgacctcagttgatgttagtgacactctctggaccttaggaagcccacaggtagtggcctcgcctatccacatatctcttcactccctctgtgggctatttgtgggactatccactcgagatgactgtcagtgtctgggatctgggccactggagaagggagatggggaaaggagactagagcagcatgccctgctccctgctaggtgtgaatctaggctacccacagtcaaggaggaaagagtggggttaggaggagttctggaaagttgggtgctggctttttccttcaggtgtctttccttggcatcgagcgaccgagtgccgttagtagccgtagtaccggtagtcagagttactagcgtcggcttggtttcctgagctcctccttccagcactggcattggaggccttggaagccgtgtctctaatggacagggacctacaagtttgaataggtctatgtgaggatctaggtggcggatggactgtgatgctgccagttcctcaaatcctctgagaatgtatgtgccctggggcctgactattgctcccctgtgtcctcaccgagacctcactgtacggtgggagatgggaagtgctatctcaggcagccaatcagaacagaggagaaggttttaaggatctccgagtgtgggaagggaatcccctagtctccaaatgacccttctagtcctaagcctgtctttcttcctattaatctttgtctcctgatcacaatccttagagaaaccatctggcttggtccctgctgccaaagcgttttccatttgcaggagtatcgagctagtttatagatttcactgttttcagaatagctccctttaatcttctctcattccttaaacatggcattccctttcagaacctgtgctggctggaggagaaagagaaggaggttgtcagtgccttgcgctactttaagaccattgtggacaaaatggccattgataagaaggttctggagatgctcccggggtcagccagcaaggtgctggaggccatcttacccctggtgcagactgaccctcggatccagcacaggtgagtcccccagaaggtccttagctgtggcagagcaggaggcttagaggcgccttggtttggggcatttgaaacagtggggagaaaggagtcctccacttgcccccacttcccagctttgaggcagttgctcctccagaggcctgtgtgctggccaactcctagcagatgccaccaccctccgagctgtggctttatcctgtgatcagctcactggcactgaggacattgggttggacatattctcagagcctccatcatcatttaccatgacctgcagtccgttgtcattcaagcccacggctgctgggattaccatctgataaaacggtggagtgacatccttgcctgggccaggcccatacctcccaggcagcctttgattgctagagtgtgtattttcctacaggttagcttgccccacttttattattaagtatcacaaggaaagccatgctcgatgcaatccccaagcttgcaggaactttactgaaaagactggcaggtctggggttttgtctgtgatacccattcataatcgatgcatctctgtgtggatttctcaaggcagcttagtgtccatttaaccccatgagactgagcttttaagaatggctttcagaacttggcagtgaagttcacaattttcttctgagagatctaacaaactgtctttattcccaagaaatgttctgcctgggacgtccaccccagcttctgctggctctggctggggattgtggcctttggctcactgtgctgctgtctgtactgtggctcgcccttcgttcaccccaaagcaggctcaggtctcctttgagaaaaagaacccaacattaggccatcagatgtttaggtggttaactctaaatgctatcattcctgtgtcttcatgagatggctcccaccagggaagagttaaaatcaaattaaagttaaaaagctccctaacacatgatgatgtggtggttgtgtggtacacgttgaagaaggcagcaagagaactgcagtgtcctgtcctgcttcccagaggatgctgggggaagcagctagattgacaggggaatagaacaaaaaactaagagaacctaagggtagtatcaggcattcccccagaggcacctatctgccagacaggctgaaggactgggcaggccccctccggaggggaagccccaccccccattcctaactgtctttttttttttttttttttccgagacagggtttctctgtatagccctggctgtcctggaactcactttgtagaccaggctggcctcaaactcagagatctacctgcctctgcctcccgagtgctgggattaaaggcatgagccaccacgcccggctcccaccccccattcctatgaggccttgacaccatccccaagcttcttggccagctccgtttattctcagggacaggaggggtttgctttccttcttaatgactgctctgttggtggtgcagagtgcagctgtgactggcagaaaacttagctccttccccgtgctgttgctcttgataagtgtcattggtaaaacatctaaagacctttgctgttagaacccacttcagtcaaaaattacaatattgggctggagagatggcttagcggttaggagcaccgactgctcttccaaaggtcctgagttcaaatcccagcaaccacatggtggctcacaaccatcctaacaagatctgacatcatcttctggagtgtctgaagacagctacagtgtagttacatataataaataaataaatctttaaaaaaaaagaatcacaatattgtgttattctctctaaattgtgcccttgttttctaagtatctaatagtgatggagtgattgtttttgctctcctgttacagtgtacaaaatttgatgtgagaacagtaactctttctagattccttaagaaaactcatgtttagggtctgggcatggtggcacatatgaccccagctctcaggaggcagaggcaatcagatttctataaggccaatctggtctacagagtcatttccaggctagccagggccacatagtgaaaccctatctttaaaaaccttaattagtttaaaaataaaaaagtttatggactctataagaattgtaggtttggactgctattgtactgtactaaggctctcccaaataccaaggacttatattttgtgtgttgtcctcacggtgtgaatggaggcagctgctgtgtgtgcacattcgtgagcattcaccacatgacaaggcctctcgcctcttgtgagtctttgaaatcctctctacctagccacggctgcctcgatgaggatgatgaagctgagcaaggataagaaaggtctattaaaccacagacagctctcacaagtgcctggctttcctggcctgacacccaaaacccctcaaacctgttgatgctggtccatcaaaatgactgtcaaactcattcaaaacaggaaatacataaagctctcccctgtcaaatggtttgcaactgaaatgaggaaagatgttcccaggatgtgtagagggatgtgacagttgaagaaactactgggatagaatttttatgatatatttggggagggggagtgtgtgtgtgtgtgtgtgtatgtatagtatgtatgtatgtatgtatgtatgtactgggaactggtaagatgcctccatggataatagcacccactaggcaattatgaggatctgagttcaaatcccagcatctacacaaaatccagtgttctgggagcagtgatgggagggtcatgattcaggttgctcattaatgttcttttaaaactttccttccatagctcagccctctcctcctgttatagccgagtataccagagcctcgccaaccttatccgatggtctgaccaggtgatgctagagggcgtgaactcagaagataaggagatggtgacaactgtgaagggcgttatcaaagctgtcctggacggagtgaaggtaagaagtgcaggtcccaggcagcccagatcaggcagccagccgacagaagcttaaaacttgattttagaccatacacagggtgactgtcttccaaaagctgtgatatgggccagctctagttctgtccagtcactacttcactctagagaccaccagcccttcatgcatctggcattaagtcctctatgggccatatgtcccaggtatggcagagaacatgtgccagcttaatgcaatggagatggtttagcaagagccccagtctatcacccatctcctttgcatggtctgcaaacatgtaggactcctggtagaaagcacggtggagttgctgaagctaagtgtgcttgatctctgtgatgtggtcaatgtgtttactatccaggccattgcagaaagcctcagagaagataaggagccacagttggagggggaagcaaagactacaaagggcctggagtggggcccagaagcaggctaactaagagtgtcagttccagtaggggagaagcaaagctgagtgggggcccgagagatgacaagggccttgcagtggcagcagcaggaggcactgttctaagagcccttattaggctggtggaatgctttaaatcccaattcatcactaagtagtctgtgggctcagacagttactaccttggttcatcttgatgatgcccatgcacatgctcagaagcacgggtaacagcagggccctgcatggcagcattgcagacttagtgcaggatgctttagagcaatgctgaatacacgtagcccaaaggcattcatggctgttcagtattatgtggtgctaaatgcatgcttgatagatgcggcttggaaaagctgtgtcccttttatttaccctcaatccaaaattataaccacacttgtcagcctaggtcagaaaaacttccattctcagccaatctatgaagttcctgaaacatgcctcttggtgtagtgttttttagaagctcttaaaaacagagcttttagggttttaattacagagagaaggccaaggaggcattgcttggtgagagaaatcactcccaaatgggctgttagcgaaagccccagcacctttaaagtagaggctgtgtgctgctgtgtctccagagagctttgggttcactgtgaggaggagatgtggcaacactgctcccatgctgtcttctcacagagccatcagactttataccatcagtgttaagaggctgcaatctctgtagaatttggggtgcagtttatcccctcagttcttcctgcagcttctctagctgggcaatgtgagacaggaccttcccaggttttctggccaagttctgactctcccactcttgctgctcttgtaccgacttctggaaatcaaaattattttccagaccagattgttagtgtttcttctatcaaattgatcttgatgaaatattataagttaaaacagctgaaacaagaggtcaggtttccacagaagcctcaggactccagagcccccatgttccttatggactcctgaaggcagggctgcactggttggcagaaggaaggcttgaatgaaaaattgatgatttctcaatgtgaccctgggatgggagcacacacgtacagcctgtagaagttgaacatgccagcacctgagagcaaataacttcttcacaggtgttttttttaaaaatagtttaggcagaacagggtaaggagaaggctcagcaatgtggaaggcagagccaggagagtcctgaggagaaataacagagactgtgccttggagaaaacacactctgaaaagttgtcccctgccctacacacacatgaccatgcaggtgagcagacacatgcacaagcacactagcacacatacggatgcttccgtgggtaaggagctctgtattctgggggtgctatgacaggagtactcacagaggtgaagacaggggcacaggtctggccttggggagcttcaggttacataaaaggatgccacgtgccaatgcagggacaggaagtcagctggcatgtgttactagaggcttcttctagagggtgtcagtcaaggagtgagattggtcagcgtgggcatttgtgattagtatcttagagcaataatagcaaacaattcacgggtgcttttctacactgcccaactttacttgtaacagccctaactgaggcagacaccttctctgatgggccaaccgaggttcagtggcaagctcatgattctcacacatgcctgctaggcctacgcacttagtcaccctctgctgccccatcctaggagacccaaaggatccttctcattcacacttcctaacaaggacacctcagaagcctgtgtcctggtgtgtgctccagccgccctcagctgggagagccagagtgtgcaagcacagtgctttagctgttgtcttcttcccacttggaggtacattccttcagagtgactcaccgcccctcagggagctcattcagttgttaaatggaattgtttggggtggggttgggggtaagactgaaaacttgtctgaaaggcagatgattttggtattgttcctacatggaaactgtcatctgccgtgtaaatcttcacgtaaatgccacttgtgagctgtataaacgtggacaagtgactcctctgagattcttgtaagttcttaaatacccagagtgtgttaggagaggtaagattgtgtctttggagtactggcaagggttgggtggctaacaggcaggatgagcactggtcaccttggcaactttcaccagagtagcttacatttacgtctcaggggagaattgtatttccctctagggcaactcacaagttttgggtcttctgtactgtgccagttaaatgcccacttctcctctgacctcagacatgtcaggagcaggcctccagccactcagacagactaaagtgttatcatttaaaataataatatgggctagaggctaagaaaatactccctgctctcctggaggatccatgttctgttctctagcatctgtattaggtggcacacagagaactccatttcttgacctccatgggcatctggacactcacacagacacacagaaaaaaaaaaaaaacaaaaaaaaaacttgtaatgctttcttccactgaaagccttggggaatcccacagctttgtcacttgnnnnnnnnnnnnnnnnnnnnnnnnnnnnnnnnnnnnnnnnnnnnnnnnnnnnnnnnnnnnnnnnnnnnnnnnnnnnnnnnnnnnnnnnnnnnnnnnnnnnnnnnnnnnnnnnnnnnnnnnnnnnnnnnnnnnnnnnnnnnnnnnnnnnnnnnnnnnnnnnnnnnnnnnnnnnnnnnnnnnnnnnnnnnnnnnnnnnnnnnnnnnnnnnnnnnnnnnnnnnnnnnnnnnnnnnnnnnnnnnnnnnnnnnnnnnnnnnnnnnnnnnnnnnnnnnnnnnnnnnnnnnnnnnnnnnnnnnnnnnnnnnnnnnnnnnnnnnnnnnnnnnnnnnnnnnnnnnnnnnnnnnnnnnnnnnnnnnnnnnnnnnnnnnnnnnnnnnnnnnnnnnnnnnnnnnnnnnnnnnnnnnnnnnnnnnnnnnnnnnnnnnnnnnnnnnnnnnnnnnnnnnnnnnnnnnnnnnnnnnnnnnnnnnnnnnnnnnnnnnnnnnnnnnnnnnnnnnnnnnnnnnnnnnnnnnnnnnnnnnnnnnnnnnnnnnnnnnnnnnnnnnnnnnnnnnnnnnnnnnnnnnnnnnnnnnnnnnnnnnnnnnnnnnnnnnnnnnnnnnnnnnnnnnnnnnnnnnnnnnnnnnnnnnnnnnnnnnnnnnnnnnnnnnnnnnnnnnnnnnnnnnnnnnnnnnnnnnnnnnnnnnnnnnnnnnnnnnnnnnnnnnnnnnnnnnnnnnnnnnnnnnnnnnnnnnnnnnnnnnnnnnnnnnnnnnnnnnnnnnnnnnnnnnnnnnnnnnnnnnnnnnnnnnnnnnnnnnnnnnnnnnnnnnnnnnnnnnnnnnnnnnnnnnnnnnnnnnnnnnnnnnnnnnnnnnnnnnnnnnnnnnnnnnnnnnnnnnnnnnnnnnnnnnnnnnnnnnnnnnnnnnnnnnnnnnnnnnnnnnnnnnnnnnnnnnnnnnnnnnnnnnnnnnnnnnnnnnnnnnnnnnnnnnnnnnnnnnnnnnnnnnnnnnnnnnnnnnnnnnnnnnnnnnnnnnnnnnnnnnnnnnnnnnnnnnnnnnnnnnnnnnnnnnnnnnnnnnnnnnnnnnnnnnnnnnnnnnnnnnnnnnnnnnnnnnnnnnnnnnnnnnnnnnnnnnnnnnnnnnnnnnnnnnnnnnnnnnnnnnnnnnnnnnnnnnnnnnnnnnnnnnnnnnnnnnnnnnnnnnnnnnnnnnnnnnnnnnnnnnnnnnnnnnnnnnnnnnnnnnnnnnnnnnnnnnnnnnnnnnnncacaccagaagagggcatcagatcccattacagatggttgtgagccaccatgtggttgctgggaattgaactcagggcctcttaaccactaagccatctttccagcctatggtttactatttttaaaaggtttacttttaaaaatccagggcccagatagagccagtgggtagcatcgtctctgtgggcagcagctggtgggtgcctcctcagcctcctcctcctcctccttgaaactttagggctttggttatttaaagttgtattcgtatttatgtgggcagtacccacagaagccagaatagttatcagatcccctggtgtcagagttaacaggcaagttgtaagctgccctgcgtgggtgctgggaaccaaacctacatcctctacaagaccaaccggtgctcttaactactgagtatctcagtttgttcatttgaagcttttaaaatttattttagagttattactcctgaaagttggcagtgtagaattagtcaaaggcaccctcatgatgctacttagtgtgtccctctgccccttggattcctgtgaagctggaggccagagccctctcagtttgttggtggagaaaagaagcttctagattgcactgtgcttccaagaaaggtgccctcttgatgtgggcactattgttggtcatgactgctgtgccccagagttttcagactatgacatgtaagaagatttcttctgccagttttccatcaatagccagagtgaatctgaaagagaaacttcctcttgtagctgttatacaaagcttgtcactttcttatgtatacttttcaaaattaggagtgcttcctagcatcctctgccctgtgtttctagttttaaattgttatgtagctcaggccaggcagtggtggcacacgcctttaatcccagcactcgggaggcagaggcaggcggatttctgagttcgaggccagcctggtctacacagtgagttccaggacagccagggctacacagagaaaccctgtctcaaaaaacaagttatgcagtttcctagcttgctctgcttcccagccattgtggctacagtatagcacctgaagtcctgtgtcttaggactgtgtgaggaatgccaattgttacctgtctccatctgtgggtcaagtccagtgctgctcggctgtatgtgccactgagagcatccctccacttgccacttctcactgccactttagatgtgggcagagaaagtcccttgttgtctccattagaagtcactgtggtggcagaggcaggaggatctgagttggagggcagcctggtggacatagaaaggtctaggatagccagaactacatagagagaccttgtctcaaaaaacacaaagcaaaacaacaaagtctctctggggctggacactcctgtgaccatgtcctatagctcctgtcacgggaatccaccctagtctccaagggccattgtgttcctcacttgtcagactagacctgaccctcttcctaaatgtgtgaagaactaaagggtggcactgagccgtgatgtgtaactgcaaacttcctgtgccctggcactgcacccagagaatagggtaaggaggtgatagccagggtctgggctgcagctaggatactcccagtggagtgaccccactgtgtgaactcagggaacactattcaccatgctgtccttggggttcttttttttttttaagatttatttattttattatatgtaagtacactgtgtctttagacactccagaagagggggtcagatctcattacagatggtagtgagccaccatgtggttgctgggatttgaactcagggccttctgaagagcagtcagtgctcttaacctctgagcagtctgtccagcccatccttggggttctttgtgccaggactgtcacagcagtgcggggcccctctgccaggcaggtctttgtatcattccaggagaaagtagaaaggaagccgggaccaagacattcaaattcggagccgtgtgttgacagaggttcccattctcgggaaagtctcctccagatgtgctctgtggcttaattaactgtatgttggtcttctgtatagttgttggcagaagagtccagaactcttttctaactgccttgtaacgtgagactaacaattaacttaaaagactgtctttgagaaaccctgcctttcagagatttggcttttcacaaggtactgggccctggcttactcacaggtggtgagcactcagtgagaccaggctattggaagtacctagctagaagaggtttctggagccttgtgtgtgatcgttaagacaagttgagaccaaagcccttctgtttgggcaggaaggttggcagagaaagaaaagctgccatcccctctcccagctccactgtcatgatgtggtcctggaatgtcagggcacaattgcaagtgtgtgcttgtcatcccaggatcctatagctgtccattgttcattagctgaggtcacagctgccattccaggacagcatccctgcctgctcccacgtcaggaggaactggaatttgtgctgtgtcagcagatacaaatgtgcagacttctctgcattcccttatcctgcttgctggagtacgattggcttaacgtggaggcactcatgatgctgaggcagaaagattgagaattgaaggcttctgagtcacttgggtctgacactttgatcccagccaaggctttcaagggacctgcctttgccactcctgtgcactcctccaggtagcgagtgtgggagcggctgcctccagctgcttcccttgcctccctctgacacttgtgctctggactgtgaagcaagtcgaaggccccttcctggggctagcctcagcctccccaggatcttacttccacatgactccaagagcagaacggggtgagcctggatctggttccatggacatccctctcatgacttgggggtggcagttttcttagaattaatttgtgtccattttcaaaaatgtagaagatacaattaaatacataaattacattaaaaacacacacacacacacaaaaggggttttgatcttgtttccaaaatttacagtgtaccccatcaaagcaggtagggcttttctgcacctagtatgcctggtattccaccatctttccatgatgttactatggcctgtgttcctgctgtgactttattcttactgacttcagagtggccctttgatggatctgtcacatctgcatacttggtactcaaagtgtttaatggtgctatgaacagtctcattttacctgtggtgacatcctcacaactgagcttttacatatatccatggcattttcctcagacagaatcctcctaacagatacttaaggcttttgatgcatgcctgctgcccagagtgacactcattcttactgatcctgtcctgccccaccctaccgcgtgtctgcaagttttattttgttgccatcaaacttgagaagctctcatgatcataacaccctttgcatctgcaaaactcctcgttaatatttctttgtgtatgtttatcttttttcgtagtttttatgttgtcaaaagaagctgctttgggaaatgctagttctttgcccctggtcagggagatgtggttaggttacccagctctgcattctcagaggtactgtgtgctcttccctcgtgcacacagaccatcaccagcagcagagagcagtgaggagattgtgtgcagcaatataccagaacactggtcagcagtgaaaaagagcctacctggactccctgaggcaggtggggatggccagaaagagagtggtctttgccatgggcagccagagagtcgggggactgtgcaggttcagaatttctgtcctaaagttggttgtgttaaggaccgcacatgtgctcactcacacttagagtagctgaatttcatggtatgtgaattctacctctacaattttgaaaggtgaagctggagtgatggctcattctgtaaagcacatctcacataatcatgaccagagttcgattcctacaatgcacagagaaagccaggtatcgtggccataattgtaatcccagcactagggaatcaagagacagatggatagatccctagagcactctggccagttagcctcactcagtgtactcagtgatctccaggtgctagtaagagactctgtcccaaaaaagaaagtgagggctcccaaggccaacctctgatctccacctgtcatgtgagcatacagctataagtgtcgcacacacaggaggtccatttctatggcatccatgggacagccaccataatgcacagcccttcaagtgtacacactgcaaggcccatgtatggccatcctgggggcccacagcaatctaggcagaaagtacagagtgctgggatagcagaagggaagaacaggtgagggtgggcttcccaccccaagtggtgttcacactgtggagcatagcgttcacctgggaaaaatcattaaagtggtctggagtggtagtgcatgcctttaacctcagcacttttacacagagagaccctgttgaaaaaaaaaaaaaaaaaaaaaaaaagtcatggaacaggataaaatgtgtcccagctgaaacaccacaccccttatcttccctcttctctactattttcagagtaccattttttattttctttcaaagccatttctctgcttttagaaggtcacataaccttcactctaagtccattgacaaggctcccagccagccagtccactggggctccagttcctgcattgactaagccagtgcactttgggaaaacactaaaagccagaagccaagtggctaagtgcaccattgtgcataacatgacagctttaaggagccaaaaccgcctgccaccctccccagactgcacaggaatacaagtctgtaatggtctgttcatctaaacacccggacttgccatttcccctttcaaaaggaagtacatgatgcagttgaaactttgcagtatgctgctatggtatttttagagtgaaagaggcatgttaggggttgtgcagattaccccgcgtaggaaatgtgtggacacaaatgtgggtcttagaagccctgcctcttgctaaaggtacagtggtgtcatcccctcccccttctccctcacaggagctagtgaggctaaccattgagaagcaggggcggccatcgccaacaagcccagtgaagcccagttccccagccagcaagcctgatgggtaagtctaagcagactctggttccagtggcactgagcccacacttgacaagagggagccaggcaaacagtgagagcatgagaggctgtgggcagccctggccccctttgcagtggtaagttctggtgagtgtatttcactaagcttcagagtgctgtcttgcacttgacaagctcatctggacaagagtgtatggaaggaggtgggtctcagaccccactcccaccccagttaggttctgccccaggcaacatcactgcaccataaactcccaagggcttggctgagaggttgggggagacttggatttttcagtagttcagctaacaggaggccagcccagtgttcctcagtaaactgagggatggccttgtggacagccttactattttgcattaatttcaaggactggcccgtgttaaatatgtatcacattttagagcatcctggtagctggtcagtgatgaaacgccatgggaaccccaagactgtgcatggggctcctcctcagccccatcattcccttagccccacccccatcccccaggagccacatccactctgactacgcgtgatccctagttctttccatttctctagccagcctgagctccctctgacagaccgagaaatggagattctgaacaagacgacaagtgtgtcaccatctgctgaactgctcccagactccaccagtgaagaggtcgcaccccccaagccccctttacctggcatccgggtggttgataacaggtaattctaaactcttttgaccctatttatgacctaatgtggggagtgggtggtagaatgagctgaaggataactgtgcctgggcttggcactgttaaaaagaatgtctctgagagtggccaggctctggccctgggccctctatccagtgaaaccaatcatgatttcactatggaaggaaaagaatctgttttggttctggtctttgggcattgatagagtgattggcaagaggagaacaggaggcagttaaagtatgaaaattaagtgtggaaaaagaacttcattcatgtctaaagcacgcttgtttgtgatgtaaatttgcctggattttctgtctcttctagtccaccagcattaccacccaagaaaaggcagtctgctccatcccccactcgggtggctgtggtagccccaatgagtcgggctaccagtggctccagtttgcctgttggaatcaataggcaggtaatgaagtcctggttctgttgggcgactagaaatggagttttttgaggcttgtgtccgagtgctggaagtcgcctgtagtctttacacccactattactcacatctagagacttgtgggagagcaaaccatagccatccctcttccctccatgacatgggcatctcccaagggcatccctgttgaaacactcacactcctcccggttcctttcctgtcggatccgatcctacactggcatcagaaacggcctcggagctaggcaggctttcctctgagctagtgagcatgtcagttgcttgtccctggtctctgctgtctttccaaggatgactgaagttcctttccattccttccaaggactttgatgttgaatgttacacccagaggcgcctgtcaggaggcagccgctcctgcggtggtgagtctcctcgcctgtccccctgcagcagcacaggcaagctcagccgctcagacgagcagctgtcctccctggacagggatagtgggcagtgctcacggaacacaagctgtgaaacactaggtaagccatcacaaccctcctcgtccctgggtggggtcctttgattctgggaccaagtcagctgatacccaggcattagttggatgtccttagtcaaattctttaaaatccagcctcagtctgctcatctacaaaatgaagatggtgtctgctgtctgctgaggaagagtctggatgtgtgtgtgtgtgtgtgtgtgtgtgtgtgtgtgtgtgtgtgtgtaacagtgtaaagttacacagcagatgctcaggcagttatctccttacaggcagcctggcagtgttcagctaactcatccagtgcacatatggctttctctgaaggagggagctcctgaaggtattgacagaggttgaaagcattgagcagcctcctatccttatcaggcaccattgaccaaggtcagcaggaccatttgccaggagcttgctggtaccaaccagtttgtgtcctagaaattagatccttttcccttctgagaaggtgtcctaagcacaaaggaaagattgtcagcaggctcctgtccaaggaggctaacctacaaagaattaagtggtgataagatggagacactgctaggagccactagtggcaaccagatgaccgactgaggagacattgctctgatggggtagcctagagctagtgaaaatcacttccgtatgctggtgcatggaccacaggtggtcatgctgctttctcagcatggtcaaaacggatgggaaaggtagcacctgcttgtaagccctgcccttgggaggcggaggcagggctcgtgtgctccaggccagcctgctctacagagaatttcaagccagccaggactacatagtgaggccatatttcaaaaacaaacaaaaaatcgggaataagattctagagaaaaaagaacttttcaagaaaatgcatcaaaatgtaaactgtgatggtcatatcttgagttttaattttcatgatcatttgccatcttttgtcttgtaccttttatttttttaagtaaccaggttgtaaaatgtaggaaaatgctaaggctatagcttggtggtagaatgcatgtacaaagccttgggttctatcttagaactaccaccaaaaaagagagagagagtcagagtgtgtgtgtgtgtgtgtgtgtgtgtgtgtgtgaatcaaagtacaagggcagaggccagtatagccatctcgccacctccagataaagactagttaatagttaaggagaagcccattggagagaccaagcataaagcatgtcttgtgtgagggagatggagcggagcctctgggtgacgcgttagctggatgatgcggctcatgggtgtgtcctgtgtgctttgcagatcactacgaccccgactatgaattcctccagcaagatctctccaatgcagaccagatccctccacaggcagcctgtaacctcagccctctgccggagtccctgggggaatctgggcctccatttcttggccaccctttccagctgcctttgggcagctgtctgcagcaggagggacagcagacagacactccacctgcccttccggagaagaagcgtaggagcgcagtctcccagaccacggacagctctggctgcagggtgtcctatgagcgacacccctcacagtatgacaacatctcagagggtgacctgcagaacccagtcccagtccagcctgtgccctacccaccctttgctgctgtcctgccctttcagcagggagcttcctctgcctctgctgagtttgtgggtgatttcagtgttcctgagttggcgggtgacacagagaagccacctcctctaccagagaagaagaacaagcacagtaagttctctgcgctctctgtgagcacactgtgaccctcaacagtgctgtactctgcttagcccacatatgacaccaaaatcaatcccatgacctttctttgatatagagcaggctcctaggtgcacatgtagtcgtgtccaggggcccaatactattattactcatggtcctcgaaagtctaattataatagttcacctctcctctgaagtcattaaaatcgcaggtctgatgctcctctctaaatgtaacccatttcctgaacacaaagtagcaaaggcaactgactgtcacggcatacagacccaaacggtggcaaaggcaccaagtgtcacggcgcacagagcagcgctgccatagcatgcacatgaaatagaactttgtgtatgaccagagcctgtctagctgtcagagggatgtccgagtgaggacagggtgctcacagtgacctagatcagagcttgcgggctggagggctgaggtcaactcttggactagatgttttaatagatagatgttattaggctgggtggatctggaaggtggaatgtttgtattttggacaatttccctgtaagtttgccagagcattactaagtaacattctggacattccatctttgtcttccctccccaactgctccacatgggaacttgcagaccacactgccccaccctctccctcacctcactaacactgttctcagatttcccctggcaatccagatgtcaccattttgatatgtgtggccacatcagccacacagcccaactgtccccttaccttggtacaaatccagcaaggatacctaaaactaaatattgcacttcaataccctaataaggacttcttaaagaagacttccaaaagaaggcctgcctcattacacacagcagagctatcccaggaccagagcagcctagtttgtaaccacacccccgactcccaagatgtctcttgctttgtgatggccttgctggggtgtccccacctagagggggctggtctacaaactaatgatgtcatcccatgtgtcctgtaagatggcacattacagatcaagttctgcggaaagaacactcagcagttgggaacaggtctttctgggcttctccacaccccgtagcccccaataccgaacactattaatgtcggggaccacctgctttcttatcaagagtcccatggactagggtgtagaacaggattctgtctatcaaactctaccagatgagtggtaacgcctcctgcttgctccttagaacaagtgtggcccagagccctcaagcagagtctgcagagaaggtaatggcagacagggagagcaaggccattgcttctgttgctctcgagtctcgagtggctgaagtgggttttgtggcaggagaagcaactgaagctctgtcctgctgtggctagaggaccgccccttgcagattccttaggccagccaagggtccaaggtgatggctctgagcagaagcttatatagttagttttccaggccaggcctcagcagcaggtgaggggcagtatgggtttgtataggtttaagcctggccagctctgagtacgcccaagcccagaaggaagctttgccttctgtccttaagacctactatgttttcaacaaagatcttccttccctcccccacccccaatgaaggggtcatttctctatgttcagtgaaagagccccaaacctgaagcaccccgagctcagtcctggtccagagtctgccctgcactccctgaggggaccacgggagagccggcgggaagctacacggaagtgctttggaagaaaggaggagtgaatgtcagcccttgtacttggcacctctaaagcaagttcatacgtggcagttctgatgtcatagtatgtcctcactaaggggtgccccagcatgacttcttgttaagagtagcccatgggagtacctgaacactctagggtacttatagtcccagagcccatgtctgaagaagtgtatgcagccaagcatcccaggttcgctggctgctctgagtgactctgagcatctgagtcactgcccaatgtggaaaagtcctgggagggtgaagctcactgctgtgcttctgtgtgtagctggcaggtctctaccaggtttagaggttctaaaggcctggggcgaccagcttgaggggacagcaggtagagaaggttgcttgacccttctagaaagccagtgctggggctaggtcacccctagactgtgactgagcagggatacagcagtattactgaggggcgttgagagtacttctcttccatggtcagctgtgggagcacagccatgttctgtcagtgcccagcagagccagcaagttctgtattctgtgaagtaaacatggcctccttcctttcagcaaaaccaccaggaggaccttccaaaagagagtacctttgccaacactctaggcctcacatggggccccagggagaagggcactctctgcctcaggctggcttcctctgccttctaactataggctcctggcacttggggtatataacctaaggagacagtttctgcctggaagatgctgaaggttgctcttcctgtgtctgtcacacactgacatagatcctttagtcctaagcccaggctccttcacggctgtcatttttgctctttctatgagtgaattgatattcagtcctaactaagtgtgcaagggccaacgctgtgctctctaccagccagcccttccttccatgtatgtagggaggttccagtgcctagggtagggatagatggaaggccagccttgatttccctctgctctcaggacggcagtcacacccctaggcatagtactccagaaccctctagctctgtggacagtgaggcccagggaacactacactgaccaccacaggagggaggctgctggccctgcacctgctgtgggaaaagtgcctgcagggatgaggccatgacatgtggcagctgagctttgatcctcaggcttctcaactacccaggcacaggaggaccttgctgtcattggctgccaccctgctgaggcaaggaggctgacctgccaggcagacaggttgtgacaggcagcttggctgggagatagcagcttagcctccacatggaagggaatggagcaagggtggagcagatgtatcagttggcatttgttactttctcccttccgctctgttcctcgtgctggcctggcctgtgctcacagatagagacagtgagctaacaggtccctggaggtccttgctgggaatgggtttgttccgcagatgtttgtggaatcagacataggtcctgctctgctagcgcttcagcccttaccacgaaagcagtagtgactcctgctccatctgtttttaaggccctgttccacatcactgtctcccactacaactcccttagattcctgccatcactgaacagacttagagtcatttcaagctaatgtgcgatgtgggtcaggcccacagaactcccaagtagagccctgctatgggtagttcccggtgctcagaacagagcctgctgcaggcagcctctctggaacgcagagaatcagccttcctccctgattctgtgcatgctgtgctcttcccaccctttctactttcccatcttgggcctttgtgtcacccgtgggctagggtaaaggtcctggcccatcctcgtgtcatcctttcatagtctaaagcagcaccacagccaccacacttgtgctttctctgtggcgctacaccaccatgtgtgggggtatgtgtgtattctgttgacccaatgagagcatgaaccctgtaaggcagaggatccacctcgctggtcctgtgcacttccagcatctgtgcccctgcctacatgtacagtaccacctcctcagcaaacaatgaggagaggccacagactgctagatacaaactgtaggaagagacaaggaatcgtgtgagaaggctgtggatggggagccccaggcatagtagatcaaaggacttgggaaaatcaggagccctatgtttgttcattatttggtccaagataatacagacaaggctaagcccaagggcagcccgaagctgagcagtcctgcagagcctccggtgttgctgagtggggaaatccccaacacctgtgcaggaagggtgcaaagtgcccctgtactttctttaacagaaccttatatttgtagagccgttttaggctcacaacaacattgaatggaaagtacagaaatttcccatactccgaacttcccccaatgtcaatagccctggcagagagggatagcagttacagtggaagagcgtgacagtcatcacgtccagagcccaccatgcactggagggttctgtaagtgtcaccagctgggtgatggcatgtgtccacctttgtagtagcacccagagtaacattcctgctcctcgggggccccaagaacacgagagctggtggggacagctctgtgggccccacactggtgagatcagcagccccctctgtccacagtgctggcctacatgcaactgctggaggactactcagagccacagccctccatgttctaccagacaccgcagagtgagcacatctaccagcagaagaacaagatgctcatggaggtgtacggcttcagcgagtccttctgcggtagtgattccacgcaggagctggcccctccacccgctctgccccccaagcaacggcagctggtaagcagttccccatctgtgtccttggcactgctgcaggtgaccagagcttccagtcctaacaggcttccaagaatttgcgtggtccttgcggggccaggttgaacctgcttttatccgtggtggaaccctagacttaggtgtgttcaagtcattgtgtcctatgtagtacctctacttcctttccagatactcaccatcagcttgtccctcacactgccatcttcccaccctggggacaaagggcctcctgcagtaactgtcctgtgtaactgggacagacttgcgctcagaatgtttgatttccctgctgacaatctcgtatgccttccctttcttccttggctctaacataggcctcatagacaggagggactcaatcaaagcacagagcgctgtctgtgtgcagccatctgtgaacttgacttccataatgggcctaactgtatggagtgacttctatcccatccctggccagcgatggccccatgggaacaaattccactgaagcaggataggtttagacagagccactttgtgctgtaaacccagcagtggccattgtgtgcctctgccatagatcctgcacagttgttccgctcaccagggggcggcagagcactgagcctgccagtgctcccaacctgcagaatatgttgggtgggttcaagttcagagtctctgggccagccaaactctgcagaggggagatcttaacctttgcagagctgtgtgggctgctttgctacctggcaagaaaagagacgtgtgtgttgacctaagcctttttctgtgaattgtgaagtgagccctacttaccttgtagtacctggggcttagtacctcaggcttctgagccgttcagccttgtaggccatagccagctagctaagtagacatttacttctgccaagaagctctcaactgactgagacagcctctcctagagatgaaaatctggggaatctgggtcccagccctgtccatggtgctacatgggaactaaaccacctaggttgtttcccaaaaggtcatctgcatgggaatagaaatgctgatttaagctgggcgtggtggcacatgcctttaatcccagcactcaggaggcagaggcaggtggatttctgagttcgaggccagcctggtctacaaagtgagttctatgacagccagggctacacagagaaaccctgtctcgaagaaaaaaaagaagaagaaatgctgacttaagggaccactgctggccatgccttcctgaggttgttcctccatgacctgtgggtttccctaggcatctctatagtggagaagtccgtagattatgagcagctggagacagattcctcacacaaatgtggaacagaatcactccaagcatgtaacatgagacagcctatcccaccatgcagcagggtagggagagaacagccagttcgggacctccccagacagattcagnnnnnnnnnnnnnnnnnnnntcaggcttctgccccgttcagccttgtaggccatagccagctagctaagtagacatttacttctgccaagaagctctcaactgactgagcacagcctctcctagagatgaaaatctggggaatctgggtcccagccctgtccatggtgctacatgggaactaaaccacctaggttgtttcccaaaaggtcatctgcatgggaatagaaatgctgatttaagctgggcgtggtggcacatgcctttaatcccagcactcaggaggcagaggcaggtggatttctgagttcgaggccagcctggtctacaaagtgagttctatgacagccagggctacacagagaaaccctgtctcgaagaaaaaaaagaagaagaaatgctgacttaagggaccactgctggccatgccttcctgaggttgttcctccatgacctgtgggtttccctaggcatctctatagtgagaagtccgtagattatgagcagctggagacagattcctcacacaaatgtggaacagaatcactccaagcatgtaacatgagacagcctatcccaccatgcagcagggtagggagagaacagccagttcgggacctccccagacagattcaggtacacactgtcctccccacggttcctgatattccccactgttcttttttttttttttttttttttttaagatttatttatttattatatgtaagtacactgtagttgtcttcagatacaccagaagagggcaccagatctcattacgggtggttgtgagccaccatgtggttgctgggatttgaacttcagaccttcggaagagcagtcgggtgcccttacccactgagccatctcaccagccccccactgttcttaaagagagactaggaactagaagaacttatcactagcccacagctatccaaagacctagaaatcaagcccagctccagatgagccctgaccaaccacagaacaagctatgctaattgctagttgaatcttgtctccagttcacacatgtaggagctgtgcacaccttacacacaagggtgataatagcaattacacttacttcacatacagtaattatgcatggcacttgatttannnnnnnnnnnnnnnnnnnncatgacctgtgggtttccctaggcatctctatagtgagaagtccgtagattatgagcagctggagacagattcctcacacaaatgtggaacagaatcactccaagcatgtaacatgagacagcctatcccaccatgcagcagggtagggagagaacagccagttcgggacctccccagacagattcaggtacacactgtcctccccacggttcctgatattccccactgttcttaaagagagactaggaactagaagaacttatcactagcccacagctatccaaagacctagaaatcaagcccagctccagatgagccctgaccaaccacagaacaagctatgctaattgctagttgaatcttgtctccagttcacacatgtaggagctgtgcacaccttacacacaagggtgataatagcaattacacttcttcacatacagtaattatgcatggcacttgatttaatcctctcccaatacacacacagtgctagagttctccacagtttccaggatcccgaccaccaagctctctaagaaatgctcagggccagtaggtgttctctaatggtgcctaaattcaaccacaagggtcttgagcctggggtctgagctctgaatccagagagaccacataggtctacccagctctgaagtgctcagggtgggctagagagatggctcagtgtttaagagtactgactgcttttccaaaggtcctgagttcaaatcccagcaaccacatggtggctcacaaccatccataatggtggccctcttctaatatatctgaagacagctacagtatacttacatataataataaataaatctttagccgggcggtggtggcacatgcctttaatcctagcacttgggaggcagaggcaggcagatttctgagttcaaggctagcctggtctacagagtgagtttcaggacagccagggctacacagagaaaccctgtctcgaaaaaataaaaacaaaaacaaaacaaaaacaagtctttaaaaaaaaaaaaaaaaaagagctcagggtcaggtcagtctgtgtgacttgagcccacttgtcctctgaaggttggcattgcaatctgcagtaagacggaatagcagggcctctcatttagtcagcctttggtggagccaggcagccatctctcgggggacacccctccgcagtattagttagtccacatctatactgcctgtgctgaccattctctgctttctcctcctccctgccttctattttgccctccgcccagcaggcctcctatgctgcttcttccttctctgtctcctactgtgtccagcaaactaaagtggccttcacccccgaggacggcagtgccgctcagggcctcagtgtatccgtgtctaactcctttctcaaccggcacggcagcttgcctgtgccctcggtgagtctcccctgctcttcctcacttggaaactcgtgaagttagtgcttgaagcctgtgttcctggatgctgctgctgctgcctgtcaccagtgctgtccttccacagaccctgtgtgcctgctgcggaagggatcagagtacttgcttccctgggccttgggggctgtggttaggggtccgggagtgaggtgtgggctgctctgtctggagcatgacactggcacggagcacagccacttctgctgttgtgttctgctctcccaggggcctgtgtctgcacttaaaaggggacaaccctttcagcaaaatcttgctagtatatgcaatggtgtcagcgtttggaagctgatcatgggatggatctctggatatggcaatcactagatggtccatcctttcgtcacacttccaaattttgtcactgtaactccttccatgggtgttttgtttcctattctaagaaggagcaaagtgtccacactgtggtcttcgttctcttgagtttaatgtgtttagcaaattgtatcttatatcttgggtatcctaagtttctgggctaatatccacccattatgggtgggtgggtatgggggacttttgctatagcattggaaatgtaaatgagctaaatacctaataaaaaatggaaaaaaaaagggggggggacaacccttatctaggaagcaggacagagaggagcaggtaacccgatggggctgggtggtggttgggtgcttttgcttaccccacagccccgaggccctgtggcttaaagcagtagccctttgtttgtgctcgggactcaagttaggaggatggtatatgaatctgcccaggcaagcatctttgggagctaggacagttgggctattttgtcaccagtgtcaggctggtctaggtttgttgttgtagcagctggcaggcaacaaatggaaaagtgtcaggtgtcctgactcagggtcaacgtgacagccactcagtgggaccacaaggatcactgtttggggggggggggaaccctgctcctgaggggaggactgcctgccactgacacaggacaatggagagggctacatcagtctgtagacagctcagtagtgacacaaaaggaggcctggctttctggactctgcatttgccccagagccaaagcagccacctttattcctgtgatcccaactgaggcccagagggaaaagaatggagccaagttcactccctggaagcagctcgggctcaggtactgacttctccctgggcctcggagtcttcttgaggtcacagtgtgattgagggaattgaatcaagccatgggaaggaagcaccatatgcgtgggaagcagagaagctggcactgcactgctgcttctcctgtgctcgggagcgtggcactgacttcagccacccgggaaaggcttgggtaggggaccagcttggcacttgtctgatgtccacctttgtctagggtttgcagttcagtgcccaggaccttcaggagaaccttgtaagggtggagcctcccttctcgtggctctccgcagtgctgggtatatgggacagtctgagtcacctctgccctaccacacagatcacctcttccccagaaggcacctctagcaagctccctccacggaccttgcaaagcttggtttcaggcagtcctggtccttgactgttaatacacacaaacacacacacccctaggaatttctcctcattccttctgagctgttagcagaggactgtggatgaactgggctgtatgctatagaattgcagacaagggcgtttccttaggtttgggtctgagtgtgtcacttctgtggaatgttgaggcatcttacgtttgtgactctgtattcttagctccagctccaggaaagaatccctgctaaaaggataggatatttcagtgaaaggaaagagtctccggaaccgtgcttgcagtgtgtgtcagctgataggtcgaaccccatgccgtgatttagtgtcttgccagctctacacagtctctgggtaattctaagaggagcttagacatgggattccacagtgcgatcagaataggagtgggttagctgtaaggatgaaaagggaggatcacatacaatcagtagggacagtcagataagctgagggactggctaaagcaaggtgtgagtgacaccccgagctactcgagccttcggatgctgtaccaggcacttcttcctgttctttccaggttctgccgccctgtgggctgcttggggtgtcttcattatcgcccagttctggaactgcacctctttcctcccagctccccacacctgtgtcccagctgtcctgaacaatatgagttgggtcgatatgtacactgcccttgagcagtagtgacagcatccagactcttgatggtcacaagggtggtcactccctgtgtatactgtggagtgggcggtagagaaccgcctctccccatcccctagagtgtcctgggcagcctttctttactagcacccattccacccattccaaatgctgccaccaagagacctgttgggatgctggataagcaaaatagctagctgattccacttttagagggtatgtttaagtgcctgtaacgatgcttatgacttaaaacaaaaatctttgaaatatgaaagctaaatgtagcctggttgtggtaatgttcgcctttaatcctagtattccagaggaaaaggcaggtagctctctatgagctcaagccagcatggtctgcagagcaagttctaggacacccggggctggctacacagagaaaccctgtcttgaatccctcacccacccacccctaccaaaaaaagaaagctaagtgtccatcgccatggaccccagtgtttgaaaagggctgtacagcagctgctatctcgttctgggcccagacaatcctttctttctctgagctgctagatccaggctttgaggcatcacacatgtgcccttcagaagacctaggtctcatataaacatttggcttctgtgctgtggccagaaatgcagccggagcctcctcctgagatttaggactggcccttaattccaccagtgtgcccatgtctctcctggccatgagctatctctgaaaattcactcaaaagctaccacagataccatgggcataccacctctaaaaaccaagcctgaaccaaaggcgagagagagtagggtagtagggtgggcaggaggatgaagacaggctcaggcagcttggctttgctccagtcaccttcactcagtccatgccatcttggcctaagcaaagccagatcacacacaggagaggaagggatgtggggtgtggtgggggggtaaagccctgtaggccagggccagagaggtgttgctcagggccacttccttgtttcctgggcttgcctgaattcctgggtttccatgaaagattccctgcattgttagcatcaggagggtttcccttatgggggaggaagtacctgttctgtgaaaagccactttatagaccgctgtctcctgcctggactttgccagcacatgtcccaggtccctagctactttttttttttttttttttttggtttttcgagacagggtttctctgtgtagccctgactgtcctggaactcactttgtagaccaggctggcctcgaaactcagaaatccacctgcctctgcctcctgagtgctgggattaaagtcgtgcaccaccagcgcctggcttcctagctacttttatgcagaccctgagttctaagccagtgtgtagcaggtggtgagtgaatgtcctctcctgactggccttactgtttgttctcttctggtctgtgtgtggctccacaaacatcctgtgtaccccacgttcatcatctacacagcccccgagtccttgcactgcagcaaagtctttcacctggagctgggacagttctccctctgctgcctctgtcatgctctgctttgctccaccaatgccctacttctgtggtgaaatgttccatccctgcagcaccaggacaacacccacatggtcttctgccgctccagacagcccttgaaataaaccatgataactcaccgtatgcttatggaaagcccaggctgctgcaggcctgctcagcttgagcgcacagacagactggaccctgtacagcagcacctcccatgcttctccccctgcagagagccccagtatatacatttccagctgagggaaggcaggggcaggacaaggctgcttcaccatgctggagacgacaaggggccagaagtcagtgttccttgcctttgggccttcacaaactctgcttcagaaatagccacacacacagcccactagaattctaggcttgctgttgtcctctgcccatcagggctctgggaccagcccaagacacaagaatattgctctagcaccctgctccatctgacaccagagtccagcttccaggaaggccatgtggtgacataacccccaagggcactgctccacaggtggctcttgcctttctgcccttgtcatagtgcctgacacttgtccaggacctttcttacaagtctgtgattgagtatttttcccacccaggatatggagacaccaaggcaaaaaagcgaagtcatctgctcctagtgtcaagcttgagccggggataggcccagatccatcatgaagagtacgttaggcttatgagctattatgtggccagacaaatactgagatgcagtgtagctgatcagaactgcctctaggctggccttgcagaagtgactctccaacaggaacaaaggcctgtgacacaggcatctgcctctgagtctaccacttggctttgaaaccctgcatttgtcatttgcaaaatgtagttcttgtgattagcagaagagcctcaagcaagagagctgcccctagataagacagcccaaaagtaggcattggcaaatgggatgaggggagcaggggaaagacaagagacaaagggggagtgagagcagtgttacccaggaccctccctgccctaccccctgggcatggtcacatcccaccccaaaggaccatagctgtctccccaggcaaccattgggagctttaaagcttgactacatacctagcctgctgctgccagccaccatgataaaggctggtactctggtgccagggccagtactgagcacagcacctagggagagtccaagtcatgaaagtaacttcctgtgactgtgtttagtggccttttgaaaaagcaatgtggtggcttatccatatttccttttttgttttgttttgttttgtttgagacagggtttctctgtgtagccctggctgccaagcaactcattctgtagaccagactggcctcaaactcaaaagatccgcttgtctctgcctctcaagtgctgggaataaaggtgtgtgccaccaccatcaccactacccagctcatatccatattcctaagaatatccaaaacttagccatcctgaggctgttccatgcagggatggcctgtctctagaggcttccctcacagtcaacacacaccgtcctcttgctgtcatccacctgggagctgcaggctgggtcagattctcagtactgatgtgcaggccacccctcccaccctagcagcctggccaccagaggaatgaaacagagtagctgagaaataagctgccaagacagcacaggccccatcccctggcaactctatgccagcgttaacagagaaagtcagtctcactgaagcttggccaacatcaggcggctctgcctttaatgaattagcttcaagcaaacagaggttgcctgtcagtcttcactatcttttttactccaaaaatgggttgttcgtccaggcatatcttttcagaagagccaactctgtttccatctttcctgcctaacagttagggctctgctctctgtatccatccctcgcttgctcgaccagcatcagaatagtgctctgctgaggacacccctcccccgagtcagatcaggacagacaggggagggcgtttctcagatccaagtgtgatacaggccaccccatcacagggtgttaaggaggtgggcctctgttccttcagtcagaaagattgcagcagcacttcctgtccgtgtaatgagatgacccaccacagcactctgagcatcactgccccggccagcctcagtgtccctggcagatcccctgcctgacactggaaccagtgcctctctcctggtacttactctgccaccactaccatctttccccagagtccccaacccaaacagcatctctcaggctataaatacaaatttttgctgcacagggatctcaaaaccaaaccaaacactccccagatccaaaaatagactggaggctgctttggggctgtgaggtgaccatctgtgcccttctcccaaccccggggatgagcgtgaccctggagggtctgacagccagggcctgtggaaacagccacccagagcagcccagagcagcggtgctttatggtgattggagaaccttccccggctcctcccacccttgcaaaggtacttttcaagtttggctcttgtcccagcacgactgcatagctggaatgcctgaggaatctaggagcaggggctggaagggaggggaacccaggcccctgtcccagacacactgctccagcctcttcctgtccattgagtcatcccactcacagctgagctgctgtggtacaggcctggcagtggtctgcacaccttaattaataataacatcagacaatgtgtgacacccgtcagcccagcctgagcaacttatcatcaaaggatcctctcaagaaataaaacagcagctggagaggtggctcagcagttagaatacttgttgcttttgcaaaatacctgggttggaatcccaatatccacatggtggctcaccactgtccatagctccagggaatccaacgccctctcctggccctgcaggcaaacactcatacatataaaataaatcaaaaataaaccaaaaaaaaaaaagaaactgtttaagataaatatttaagtgagtacataaaaccaatatccaggtgtagtggtacacagctgcactcatgagactgagacaagattacaggtttgaggccagactggcctacatagccagaccctgtttcaaaaggaaaattacaccactggtggctgacaagatagctcagtagtagccaggcatggtggctcacacctttattctagcacttgggaggcagaggcaggcagatctctgtgagttccagacaggcctagtgtgcatagtgagttccaggccattgaagactgtatagtgagctccccatccctccacctcagaaaacaagatggctcagcagataaaggtgcaaggctgacaacctgatttgcatccccagggcccatgtgagaaggagaaaccagttccgacctccaaacacgcacagtggcagcacactcatacacacagagaagtaaatgcatgcagttttaagttcttttttaaattatggtaaattattttctaaacatctcttgatccagccagttgtgttgcctcctgtgcagaaccccccccccccccgctgttacggggtagagaaggacagctagtgtgggatatgggccccttgcagtagccatgctgagcactagcaggacactgttacactgacggctacaactattcaatgagaaaatgattgtccttttcaccccatgggcgtgggctgacttttgagacaaggtttcctgtatacccctggttggcctgaaactcactctgtagaccagctgatcctgaaacacagagatccacctgcctctgcctcctgagtactgggattaaagatgtatgccaccatgcccggcacaataaatgtataacccaggctagcctcaaactagtgattttcctatctcaacctcctttagtaaatcttactgccatgtgctaccacaactagctcactccattttaaagatgaagacactcatccacaagaacttatttgtccaaagtcacacagatggaacagtaacaaggtatagatgccttggatggggaaagggaagttggggggatctgcagcctgtgttgaggatcacagctgacccagattcagagagaatgagacagctctgccggctaggcaccacggcaccctacaacagagccagaagctggacggcatggggtcagtacagcctgtgctgggtgggcatttctgagtcaaaccctaacatctccaattagtttaaaacttcatttctccttcctttttcttatttccgtgggttctgaaactcctgtaccacagaaaagtccagagcacttgagtgagccgtgtgtatgtttcagttggcacctgtgatgggtacatgaagacgacaggaagaccaagtgtgcctcctcactgtccttccaggccctgtggtggttagcagtttgctggcaagcctccagcaggcatgatagcatcaaacacctctcagcttgggaacttggagcgttctccttgggcctcagaagctatgaagacttaggggcacctcttagtctgccatctgacgtttctatcaaatgagaagtagaggagtcaagcctatggctctggggtgacatcagaaggggaagggagatgctgaaactccccaagtcattgttgggctcctgcccttttctaaaaggcctgaggtgcatctgatatctaaagggcggtctgtctgtctgttaaggggtaagctaaagttgtccagaagatccagatgaataaaggtgccttggagttcagttctgaggctcctaagacatggggtagtagaggttcgtttgcacatgtggtgatcagcacagagagtgggaggaagtatagcctcctttcagatagtgccatcagcctgcaggtccctttctgaaagcagtatagtcatgaaagtctgtaaggggttgtctggcattctggcatgaccaacagcccccactaggaaagacaggacaaccaggccatggtggtgcacacctttaatcccagcacttgggaggtagaggcaggtggatttctgagttcaaggacagcctggtctacagagtgagttccaggacagccaaggctacacagagaaccctatctcaaaaaacaaaaccaaaaaaagaaaaaaaggaaagataggacacaccagccatgctgagcctcagttaacctaaccaccttttctcttgtctgttttctccttcccacattcttgtttgtgtgttttctgcctgggttctgtagtacaaatctgtgtttaggtcttactcccaggacttcatgcctcaccaccaagcctccgtccaacctttccttccgcctacctcctcttcctctccacatttcccacctgtccacacgtcccagagctcggacttagcggtgcccaccgtaagcagtccgcctcccagcaccgtggacgggcctctctcgtcttctcaggacagcagctttcatgggaaccctgtccgccttccttccgaaacctctttcactgactcggtgagaattcagcacacacatctgtgcacgctggcctgcagggttttagaaaacgatgctactgcccacagagggccttgtcctccctccctcggcccaggctgctgctgggttaaggctactcaagcatgagtaggttggcacctaggggactgcagttctgattgatccacctgttttcagaacagaaaccaaatcttttgtataggatttctatcacactgggaattgggctagtgaccatttagaacagtaaattgtcacaaagatgagatagagaacactgtgagctttctgttgtatgtctgtgaagaggtgcagactcctgtggagtggaagaaacagaggtaaggtttcttgtaggcccatgcagaggccctgtgcttcatcagaacacagggaggaactacactgcagagcagaggggacagatagagggacaaagagggtccgtctgacagttggagacatttcccacaccttgttgtcaagtatgttatttcttgttccctgccctggggacccctgcctcactacaggttggggacctctgacctctgcagacccttttacaaactggggaccccctacaggccctgctacgagtggagcagctttctgggagtttctagaatgtctctaaacacttggaagaagatccagcaggagacttgggctgggctagcccaggagcaagaggtgtgagggcagctttgccctccgcactggggaaagcacttcccagggagtgggcctggcccattgtctctcctctcaccctgtctcccccagagtgaaaaggccagcagtgaggaagctggtggggatgagtatgtcagtctgtactcctctggccagaccagcgaggagctggctccctgtcgaggagtaagtaacctcagtgggtggccttgtgcatgggccggccactgccccctcaaggtcacttcccttgcagctgcttctattggctgagcccctagaggcctgctggaagccaacccatcctatgggaaaggacatggcttccaggtagaggtctgccctgcttttgcttcagtgagtgtggcatttttcagaacctggctgaatgagtgtcctagaaaccactggaccctggcccagcctagctgctccctggaatttcttcccattcttccctcaatgctgatctcttcttccaagagatgcttttactcctgcccttcagttcttcccagcatgccctgctgccctcagctaatcccaaggaagtagggcaagtgatgtgcgccctgctggatatccacacttgtccctcctgtgagcagactccttgctggattatggaggtccagactgtggcctcacagtgcaaaccttctattgagcatgcagcttttccaaatttggcttcaggaaaacaggggaaaattgtgagacttcaaaggtcactgtcccatgagactgaatgagaagctctaggaatgaggtcgggtcatcaaggacaaggagccagtgccctggaaagcccagcctgatcatggtcatcccatgagtaatcacaccataattccctagggctttcagatatctatgtccaggcaaccaccctccttagacatcagtacaacatcagcttccctccagtgggattttggtcctgtttgtgagagctaagccagtatccccagccactggtgacctgtgtcaccagcagcctcgaattcagggactcaatgcccaggccccacagccctctctgccctgcagtgccagctccactgtgctgtccttagtgacagtccctggattcacaaggactttttcttcaccaccaccttctggacagcccaaaaacattgtagagttgtgttgtcagtggatatagaggcagcaagtctgtccaagacggctcacatttttgagtttgggcagctggacttctaaactagactgtcactgataaagggttgtaatcctgaagactgtaagaagtcagggaagtttgtatgtggtggttaaagatataagctttggaagcagatagcctcctcctatgagttcaagtctactctctgccactgggcatcctagcagtcagtttctgtagggaatggaggcgtggtggtggtagcttattgaagagagtgaaggagaggcatgcagagtactcagtgctgaaccccacactccttcagagagggtacagtgtctgtccccaggctgacacctcccctctctccaaaggcaagtgtcagtctccagggagcttgtgtttctagtaattaaccccatttgtcattagcttgttcccactgtcagctgctccatagtgctaagaaggccagcataagccgtctgtccaaatgccaccgtgctttccctttgcaggaaccaccatctgggaaggacggacatcccagagatccttcggtcagcagtgcatctgggaaggacagcagagaaaatggggaaaggtaagaagcaagcaggaagtgtccaggtcccaagagcagtggcaactcagtgagactgccagtgttgaggccctttcatctttctgatcctcaaaactgtctgcgttcagggtggaaactacaaggacactgaaccatcactaataatccaccctcgaaggtctttgctgacacctgtgccatctactgtcccatacataggaagtgtaaaagaccttcccacccacaaacctgtcactgtgggcatttctagtcataaatacatatgttgtattgctgagccattttgaaaggagcttacaggtgttgtgacactcagtcccaatataatcatcataccctcctgaaacagtggtcacaacatcattgtcacactgagatagaaatctcagtctctcccaccctccccctccccctcttcctccagggactagcctaagccctcacccatgctggacaagtactctagcactgagcttcagcccagccctgcctagaggaacttacataacattagggttttatgacccacagatcttcagtgcctttagacaccttttcccttcccttgttctcagtgtatttaggcttgcagaagggtagccaatttcctggaccacttagtgcaggctgaaggagctgccagtgagcatccctgctgcttaatgttggtgccaccttcctgtgagatgcgccagctactcaggcttttctttcttttaagttgataactggtcacctgaggcctcaccagtcttaacacagcaagtacttctgcttatcagtggcaggcctggggcaagcactaagagggttttgtttttcactttgttttgtttaaaagataagagaagcagagaccagcaagccatttggacaggcttgcatcttgtccacttttagattctcacagtcatgagtctgcttgttggctcctccaggctgggttgtcctcaagtgttaatataacacttggccacaaaggcttgtgtgtgcagggccaaagcagcctgtggattctgtcacctgcgtcactggaatcaggtgtcacattcagagtttagatgttcaggttacccacctcctgagggagggctctcccaagagctacttgtggggcccagcagacttctgatggtgaaatggtcagaaaggtaagcaccctggttgtcaaaaagctcctgggtctatgtctgcctttcgtaacggccacaccactggctggcctcctaagatggcagcaaagcacggctcctcccaagcctgggggtgttggtgctaacctgtggtgttcttactgagggtccaggctccaccagctcagctacagagaaagtgtgccctgagggccagaaagaggcacagtgtacaaaggcactactgccaaggtgggtcccaaggacccagtactggagggagaaaaactaactctggcacattttcttctgtgtgtgtgtatgtgtatgtgtgtgtgtgtgtttagtgcccaccgtgtagtgccaaaagctggctagtgactcctggatgtagcctgagaatcctttcccttcggccagatgatgttcagtgctttaagtctgtctgtccagagcaagggccctccctctttctctagtgcgatggctgcctatgttaaacgccatctcctaggagactgagcacttgatgacatggaaccatatttgctgggtcgcagctttttttttttttttttttttactgctaagcacagacttggggtagcatggaggaacatgtagcctctcttcttctccctcttacttcgcttcccttcaagtgctgcacttgtgtgtctgtgtaggggctgggcaaggaatagctgaaaccattacagagctcaggggaccattttcactcaacagcctagtcctttagcccccaggtccagagacctaaagtgtcctcaggcagagtcaagagtctaattgtcacttggccctgcctgcaactccagcttcatattatagttgccattcagggcttgtcattgagcagctcttatatataccctggtttatacttaggcaggtgtcttagtgacttttcctgttgcaatgttaacagtaatccagggggaagggtctattttggctcacagttcagtgtcacagtctgtggtgatgggaaggtcacagcagcaggagcttgatcactgcatccagtcaagaaacagagagcggtgactgctggggctcagctcactcttgtctttttagacagtctaggaccccagcccagggaatggtgctgcccacagtgagcaggtctttccacctctcctagcctatcagacatgcacagaggcctgactcctctcagttctcattaagttgacaattaagattaaccatcacctgtgttgcctcaacctaaaggcctccagggactagggaacctggggcatgtctgacactttcagcaccaaccatttcttcctcccaggtccccaaagtcactggatggtctggagtcagcgcagtcagaagaggaagtggatgaactgtccctcattgaccacaatgaaattatggccaggctgacactcaagcaagaggtgaggactccccagacctgggtcttataaccaccaaccaagagggaaagggaagtggaaaatgtgtccctgggtgtcctgtggggagacctgaggcaggcagcacctcagctcttgggctcttaggtaaaagggtcccaggagaaagctcactgtccctttcttgccagaagtgaacttggcccttgcaaagcctccctgagcctcgtgcaggtacttctgagggcagtgcaaaggaaacgcccagcagtcctcagtgtaacctgcacaggaagccctcagcagtgtgaggcgtgtatgtgttgttggtatcacagcccctccccttcctggtctctgcctgttaagaaaacgggggcctagatgctgagctgtggcttgtttgaggagccctattgataagaacaacaccaagacatgtcatgagagaagagccttttctcttctctgtgcagttctaggaacttagggtttgatgggccatcttggccctgagtagctctgcatctgggaactgttttgatggttgtaacatacagacatagaaagggtactgccctatccatgttcctgggccatcctagcaacccaggaagacgttagcactttaggccatcaggctactggtagggttagcagaatctaggcagagcctctgcagaaagaaaagctaaattccttctggaaaatcaggtcatgaacatagccaaccttgttccacatagaaaacccataacgctcagaactctggagtccaggtggaaatgacaatccgtgggatgggcagataggatattggctctgtctccctcagagtcccagccccacctacagctctgtcactagactagaaaacagcctgtgggttatgtccccacagatgaatcctgcttctactttggaaaaggactgagcccaaaggtagcttactacaggcgtggagagaaacatgcctgacatcatcctcctgtctcctaggcttaggggctgcctttctcctctggaatctcacctttaatatgaaccaggaggtggaggtagtgtggaggttgagaccctagtgccctgaccccatgtagcctctggaaggtgatgtaccctggtgctcagagcatctggacagcttcctcaatgcccagttttctgtaagagttctgaccagtccccatctacacaatccatgggagcaggtgggctgcagacactgcctggtgtacacagtgctgcctgcgactgctgagctgagatcagaaggatctcggggaccctgaagcatggtgactttatcacctcagccttgtctcatgctcttttactccagggtgatgatgggccagatgttcgtggtggttcaggagacatcttactggtccatgctactgagacagacagaaaaggtaaggcagctcccactgtgctggattgtgtcccaccaaaggcatcacatgactgcactgtactgtcatctctcctgggttcaactttggatctgatggtaccaggaaagggtagggagaggccggctccagagaccctgatgctgtcaaagttgctcctgggcatgtcccctcttgatgcaagatgatgatgcatcctgagtgtaagaacagtcattggcacctactgtgtgctccaagggcagcccactggataatgacatgttcaaccgtggcattaaaggtaaagcagccacagtagtccatacctaggatcctggcactcaggaggctgatagaggtgaatctggattcagaccaaaaaaaatcttctacagtagcacatggccctctgcctttccttatatttaggtcattcttttcttcaaagtctttagttcacatagttaactaacaagttcctaggaacaaaatttgttgtccaaaacctgccccaaccttgccatcctctctgcatcctgatcatctgagcaggaggagaagcagaggctgtacctagacttgttaagtaggctgtgcccgcagaagaaccatccatccacgaagtcctgtaagggagattgggctcccctgagctgctcaggcaaggcctgctgctgctccgccccaggaggctaatgagcccacctcacgccacagccagtttcttgttagtattccttttctttcttgtctgttttgagacagagtatgtgttccatgagccctcttcctacacatttttaaaggatttaaaagaagcagagcatcctcacacgtgcctttaatctcagaatttatgaggttccagggctgtatggagagacaatgttataaaacaacaacagaaagcagagctaggcttatggctcaatgagaaaacacttgcctagccatgaatgaggccgtggaatcaatccccagcacttgggaggcagagccctccctgtgagttcaaggccagcctggtctacagagggagttctagggcagccaaggatacacagagacaccctgtcttcaaaaaaaaactaaaagaaaaagaaaagaaattctgaaaagttgattaaactgtagataaaatcactccagacttaaagccctaacccaatcagctttctgtttgtttgtttgtttgtttgtttgtttgtttgaaatgtctaggacccaagggtctatgaaactctaaattaagagaatagtacaaaaactgtttgcctgacagaaacggaaacaggtttaccttcatctgagccctcagcgattcttcacccatttcctccagccatgacaagaagggagtctcagacactcaatttgaagcctaccttagccttgcagctacgggaccgcctttcccctagggccttggttccaggggtacagacagtgcccagtgttcagtggcacctcaggacatcctggcaaagtagccattttcacctcatttttatctaaaagtgaaagtctaggatgtgagctggcttctggcctggtcatgtaaggatttgccctgccagctgctgccagctgctgccaggccaaagagctctctgacagggagcctaaaggccttctggtctacccattgggtatgctgaagagagacttttgaactgaagtttcaataggatttgaggtccctgcagaaccagagttggctttacctgggagtcttacctgaaacagaggccgtgagccacatcagagtggacatggtgcccatagaagatggcaaagtttgtcaggcagggggcttcctgcaccagtggtatatgtgtgactcaaaggtcctgggaggcttcatggctcatatgtctaggactcagctgtgtcagacagggccaagccaattagacaagtaaacaagaagggcacacttgtcgtaatagcctttctctcaggtggctctgtgagaagtgtcagagggccaggtcggggataatgttaggcccaagctcagatcctgtcccttccttgggacctgtgtcctagacctgttacttggcccccaagcttccattcttctgaaggccactggggacaaagggacctgaactaaaacagccctgtgaatttgacagacagccctgtagcttttggctcaggctcccacccaaatgccaggcgataccagagcccacagataggttatgcaaagagctctagtaccagcaggcctgtgctgtgtctggcatggcacagcacagccatccttgagtctggtgtactctcctccttctcccaacacgcgcgcacacacacacacacacacacacacacaggctttctctgtagccctaactgtcctggaactcactctgtagaccaggctgacctcaaactcagaggtcttcctgcctctgcctcccaagtgctgggattaaaagtgtgttccactgctacctggaatgtctggcctaccctttgtctcacacataagtttctttaccttccagcctgtgaagtacggctatagtgctcaccagcacactagaacacacccttcaagaggtcacaggctcctgcagtgctcctctgcgtttgtaccccttgtatgcccaacctctgctctttctagaaagttccaacgtaacagggagttggttagaatacaactttgaggctgagcacaactcagggaccaggccccccacacctcaaaggtgatggcacacagtgtgatggtatgacgtgccacacagagccttgagccccctctattttgggaaatattaaaaagatcatcagcaagttcccaagttacacccagctactctcagccccagcagtctctctagccagttcttatctcatggagactttctgactcagagctccaaaatctctctacccaactcgctaagttctcactggcgagtcactaccatgccagccccacacttcaaaactcccatggcctttgtggtgcacatctggcaaacccacactctgccaccatacctttctccctttctctcttgaacccagtcaaaccactgggtgaaggaaaacaccacataaacttagttcagaaacagtggtaactcaatcactgggcacaataactagaatcctaatcttgtaagccatgttaaatctaaatcctctggtggcagatcctggtggatgcaccatggaaaccaggagacactcgaagctctatcttgccctctcactatccagtccaaaaggaccccacacacacaccctttcctctcttcccctatctaacccagaagtccctcctactcacccagtgattggctcatttattcattaggggatggtttacaagaagtcacctgagttcctgacttactccttgtttgaaacccctcccaggggagcagaattaacatcaaaatacaaacagcatcaggcccatccacaacacccctccatcccagcacttggggaggtgtgagaaagggcaagggggctgctctccacctccacgtggtgacctcctttctaggtccagtgtggtgcagtacagcccttcctgagttagcccaccttgtctctcatgacatcctatgcttaatatctaaagcattcgggaaataagtcacaacagccaacagggctctagagaggcgggactcattaactggcatactctttccctttggaaggaagaggtgggtgctaccagtctgaggcctccagctatgggggttctgtgtgtcaccactgcccttgccctgtgtgggcagcaaaccactgctaagctttgcagtacaccaccacttcagcctccccttgaggcttagaatggaatttcccaaaaatatttaatgactggaccctgttatctaaaaatactgcctctggtttaactgcaagagcctgttggcaagtttggacaactatctctgcccaaagcagtgaggagccattgagccactgggccttagggcagcatctgtgctaatctgtgggtggtgcagtccagagccagtatgcccaggccttgacctcttaccagcacaggggtcactgaagaaatgaagtttgtttcctacactgggcctcaggccctcccacagctaggttctccatcagaagtagccagtgcccataagatgaaagacctaggacctacctggcttttagagaggactcagcatggtgcctatgctgtgagccacagccacacctacaccctgaaccctaccaccctgactgctttgcacccctgcagacctggtgctgtactgtgaagccttcctgaccacctacaggaccttcatcagcccggaggagctcatcaagaagctgcagtaccgatatccttccccgccgatgtggccctcttccttcctttatactgtttctgaagctgtcactcaggacactgaggctgagcgtgttgaagtaactgactcgcatagtgccagcagccctcgggcctcgggcctcagcctgttcatggaggtgggccctaaagacccaggatagcacttttacttctgcagtggggccccagttcccaccccatatcccacgcagccatatcctagcactgactcacagaatgactgaggaaaatgtgaaatgacacggagggcctggaacagagctctgttgcactgtcaaggatggatgggaccactgagtaattctggaaagaccaagaaaaactgagcaaaggaaggaagtgggtggccctgccaggggcttcctgcagattctcacactgagccctgagtgtccgtctggtggggaccagtgggcttaagagtggaatagtcttagcctggcaatggtggtgcacgcctttaatcccagcactcgggaggcagagacaggcggatttctgagttcgaggccagcctggtctacaaagtgagttccaggacagccagggctatacagagaannnnnnnnnnnnnnnnnnnnnnnnnnnnnnnnnnnnnnnnnnnnnnnnnnnnnnnnnnnnnnnnnnnnnnnnnnnnnnnnnnnnnnnnnnnnnnnnnnnnnnnnnnnnnnnnnnnnnnnnnnnnnnnnnnnnnnnnnnnnnnnnnnnnnnnnnnnnnnnnnnntaaaaatctatatgaatacatctaactatagaaaggtatgattcattattttttattgaaaatggttattcttaatacaatgtattctgattatggtttccactcccctgagaaaccctgtcttgcaaaaccaagaggaggaaggaggggaggtggggggggggggggaagaaaagaagaagagaggaaaaacctaagagactggcaaggcagacccagcccccactgctgccctggtcagataatagacagcacctccaccacagctgagctttgccccacttcagaattcacccttggggactgtcactccctgggttagtggacaagactctgtggtcttagaagaatccacttttgctgcctgttcctctttctctgtccttggcctacctgggaaccagctactaggctacctcccagccacatagcctgtgactgccatctgctgggcagctgctcgcactgggcagctctccacattcctgtgtgccctaaccctaagggcacacctcctccacacctccgctcagtctgaccctgactaaccgtggtctgtcagcacagttgtggtcactccctgtttgtggactctgagcacctgctagggcctggcctaactgaaagattgtcagttaatccaccaggaacatgtcaaacctaacatgcatttacatgtgggatcccacttgactgtgggaccatttttatttctgttatataatggcacccttgaaatggagactgggcaactgacctgcatgctcccacttccacttctgctgccaggtcagtttctcagcccttgcccattagcctcagccagcaagctcatggaggcatttcctcctcgagtcatggggcaggctttgctggggcccaagcagaccatccatttggtgtagctccccttgagtgccaagacccaggtcagggatcaggggggaatgaggcagatgtggagatctggtggagacaaaacagcaaacagcaggaagctgtaatctccaaagtagaccccagcttcagctgttaggagtcagctgtgagggctgccatgggctagaggaacacttgcaggtctccttcccccaggaagatggaccagcctggctttccaaggcacaagttcccaggaatacccaccattgtggccatatggctggagaaatgatctgcaggtggaagcccatagaatatagaggaaggcctgttcactctctgggcccacagagacctgctccctctacctgagtccacacaccatgaccctcagtataacagcactcaggtccaacacacacagcatggatggtgccaaagttggtcctgcagaccagaaggcaacgttcaggaacagcttctgaagccagtaacccaggctggattgtggctttgcacattcctactgcacacaggacaggcctttacttccgtaagccaagccttcactcacaggcttcccagcgtcatgtgtggctgatgggggtggggtagaattagcattccctgcagatcctgcctgtgaaccttaacccacacttcacgtacgagaagttctctccctttgctgacacgttcaagaagcgagtgagcaagaacacattctttgtgctggttcgagtggtggatgagctctggtgagtgccgtgcccagggtccaaggaatggctgcagatggtcaagcccgtgtgcattgcagcaggctgctagcaagccagagggctgcagacttcctcacctggatcagacaaccattacgttccacagacggctgctcgctgattccattgcttcatcccagctctgggagtatcagaccctacagaccaaggtggggtgggggttaggtctggagttccttgtagagtgagtccctgtcctatctgggactcttcttactgtaagacatgctcatagcagcataggggccaagtagaagaggctgcacctccaaaactcctgccatttccatacttaaattaagcctgttctgggtgtgccgcctctgaatccttgccctccagtggcatcttgctcttgtgtggtggctatataatgttaaggtaaggaatggaggagctcagtggagataacagccttctacagacacctgcctgacatctcatcactgtgttagaccaggagcttctccaaggcacagagagcagcaagtgtgttgagtgagttggcagggacctgttgcagaaaggccacccccagcactgtggaggctgtgagtggcgtcctcaactggggccctggcctgccttttaccaagtgcccttggcccttagcctggtggagctgacagaggagatcctgaagctgctgatggagctggtcttccgcctagtgtgcagcggagagctcagcctggccagagtcctccggaagaacattctggacaaggtggaccagaagaagctgctcaggtgtgcccattccgaccagcctctggcagccaggggtgttgcagccaggtgaggagccagcatctcagccagccccacactggaggtcagagctaagcccagagctgcctttcccacagccctgtgattaggtgcctcagggaaagaccctgagtacccattgctgggcctctccccatggtccatgtggagcaaggaatcccgtgttggcagaaaaacagatggagctgcataaacaggagctaactgcgctgggctttggtgggctttggactccacacgctgatattacctcttgtaccatcctggctccctataagcccgggaagcctctctcctgctctttgccaagccggtgtcaggtgggaggtgggaggagcagaggaaggaggccagtcagccagagtgcagccctgtggcccagaagggcccattggagctaaagcctgcagctttgtcccaaccatgcttatgctgtattccaggccaggaaccttgcatgatttccacagccacgagatagctgagcagctgacactgctggatgccgagcttttctacaagatagaggtatgactgagtggtcctgcaagggaggcagctaacactctgcctggaagctgctgctgctggctgtgcctatggagagccccacacccagaccctggagcaccagagactgcagtgctgcatgttctgtttctacacagattcctgaagttttgctttgggccaaagagcagaatgaggagaagagtcccaatctgacccagttcacagagcacttcaacaacatgtcctactggtgagatggggccgcagcacttggctcggtggtgtgcgtgggacagttgagacttccttggcagagaggtcaagtggtcagtccttggatatttccagagtctgtgggcactagccttgaactgtgggcagcagagagaaggaggcagacagagctggctgaggtggcaccataggctctgccgtgcagggaaaaaaagtgccaggattgattagtaatgtctgcccaggctggaggaggtacccttctatcgttgttgctcattgcctctgcagttcctgtaagacattagctcacctgattgcttgatagagaccaactgcttagcaaaggagtggattgttaaggctttgatttgtacctgaattctttttttttttcttttgcgggggggtgggggatggcaggattcaagggtgtcttnnnnnnnnnnnnnnnnnnnntagccctagctgtccttgaactcagagatggcctgcctctgccccacaaatgctaggattaaaggtgtgcactactacctagcttgtgtctgaattcttaaagcagaatggaggtcagcagtgtgtctatcacctggtcgctttgccatttcaagattagaccaggtacctccacctcctactgcactgaccctgccccacatgcctgccatggccctagggaaaggtctcattgcttctctgtgctcttggcgggaagcaccggcccctcagcaataaccaccactcagtctgagtgttctggcttctagggccaataggcagtacttaccttttggagccatggtctctgacatgtccctgacacaggtgctctttacgggataggagaggtgattagagtatcgcacctcaccccaagtaacactacagtggcccttgtaaaccacagaagactgaagccaccctgaggtcaacagaagaacatgaggcttgcctgggcttcagcctccattactgctaaggtcctgagtctccatctcccattgactggcagagtggtctcctactcctctgtcagctgggatctgagccagcaacaaggcctcataatgcctctctctgctgaaagatgctccagtccccaagccccctctgcagaagaactgtctggaccctagaatatagtacacaccctgagatcagggccagggtcatgcttgggctttgggctcctggtgggtaagaacttgtgacaactggcacgggagtcactcacatttcgtctgccagggccactgagccagtggaggatggtgagctcagctgttgcttacctggtcctttcctgcagggtgcggtccatcatcatgctgcaggagaaggcccaggaccgggagaggctgctcctcaagttcatcaagatcatgaaggtaactggctccgtgcccagagctctcctgctctacccggggaggctagagccccaccctgtgccgtccctaccccagccctcaccaccgcctctccacacagcacctgcgcaagctcaacaacttcaactcctacctggccatcctctcagcactagactcggcccccatccgcagactggagtggcagcggcagacctcagaggtaggtggtgggaagtctgggcagactggaatggacctgagcaagaccaggcaaggatccccatctggctcctcacctctgtgtgaccaagacctctgcctctcccacttcagattccagtacctggagaagtcggcaggtccaagggctttcatggttggttgtgggcttgttacctatccctgtgcctgggtctcagcttcacctggagagtccattctttagccattcatccaaagtggctgctctgggcttggcactgcattgggcctgctaggtgggtttcatctagcacagtgagggctagatgaaaggacagatgagctcctgagaagggcctctctgaggacatgtgctcataccacccacaggattgtacacaggcctgagactctgccccagaggttagctgacactattagcaggcgtccacagggctttcgttggtatcaggacatatcacataaactcacccttctcttgcagggcctggctgagtactgcacattgattgacagctcatcctccttccgagcctaccgggctgctctctcagaggtggagcccccatgtatcccatacctgtgagtcgtctccctccctcatcttttcagtcactatgcctgacagtgcagacagctcgggtccctctgtcagttttactgggatttattgttttcaaattttaatatatacttaagagagcgtgtgtgtgtgtgtgtttgtgtgtaccgtgtatgtacagtagctcacagatgtcacaagagagaatgggatttcttgaactggagttagcagtagttatgagtggcaatgtgggtgttggaaaccaacccaagtgttctgcaaaggcagtaagcacactcagccactgagccaaccccagccccagctttgacgttagtctatttgattgctcagttaacagtttggcattagcaaccacatccctgcctgaccctgcagccaggtcagcctcacagtcctccatagccagcatttacaagcactccaggtttgtcagtactgagctcattcttaagagatccacagggactctgacccaggaaagtttcgtgtgggttggaagaatgcctaaatgtgtgccctggcttgctctggggttcagcagatacttgtcatggaccacagttgtcatcaggtcctggtggcaaagccagcacatagctaccttctactctgtccccaatacatgatgccttctgcctttgtcccctcagaggtctgattctgcaagacctgaccttcgttcacctgggaaacccagattatattgacgggaaagtaaacttctccaagcggtggcaacagttcaacatattggacagcatgcggtgcttccagcaggcgtgagtgctgcctgcttcccgcctgactctactccagggaggggcgcagcccagagagtcgggagcctgcacctgtgggatggagtttagtccctgctccctagggttttaccaggacaacatggggaaatccacataaagggctcaattcctggtctgctccccaggccacaaggaggctgtcaatccagcctctctggctcaagggcagaaggggcaggctttgctatcaccccactcagggagccactgagaagccaggcttcccatgaggcactgctggagctgtactggctggagcccggcgcgcagagagggctgtccacactcttctggtactgagcgctttgggctaggtagcagtgaccctaccaggcagatggctgtgaggagccaccctgtgagaggttctggcctggctactcagctagtcctgggctctctgactgcccctctcccaccaggcactatgaaatccggagaaacgacgacatcataaatttcttcaatgacttcagtgaccacctggccgaggaagccctgtgggaactctctctgaagatcaagcctaggaacataacaaggcggaaaacagaccgcgaagagaagacctaggagcaggctggctgtgagaacgctcaagcagccaggagaggacctggaccatcccagcctcagcctgtccatgcctggctgtgtggcagcacctgagtctcctggccggtctcctgcctccttccctatggctaaagtcccagggttcacaatgagctggctggcaggcctcagggctggcttgtgtactggtggcccctggtctggttttgttttctgttttctgtcagtgctccctcctgttccctcctctcccctgcagctggagagcagcagacacctgagcagcagaccaggggaatggcgggcttcactgtccccaggccaccctagcctccttaagtggcagataagtaggggccccaggacccttgggtagactgccctccgggaccctggagccaggggagctatggctgggagacagaagaaggtagaaagggaccacgcaggcatcttgtgctgcccacttcctgctttttaaacatggagggagaggcatgtcaacctggcccagaaagtatggtgggtggtaggcaagagccacagagctgacacttctcacagcagtggccccagctctgtcctgccatgcacggccactaaccaaggcacctgctgggctgacagcagcagcaccagtagcacctgtcgcccaccactggtccagccccagccccagccccagccccagcccacatcaccggtactctggggatcgggaagaggaggcagaagggacagttcatgctgagctggggccaagactgtgcttcagagagtgaataaggatcttcagtgacctagggagaggcaagcagcccctccgtgcttgctgtgtgccttaaatgccatctcctgttccttccaggcctgtgggcttccctcctattttgccccaccccccgcagccagcaggttcctagtccccgtttgctctctgggagtgtctgttcccaagaagtctaagcaggcctaggacgtgagggcctccagaggtttcctgattccagacaggtggcagagccaccccctgctgctgaggttgacaatctgttcagggctcagggctaggatctccctgggcatggccctgtggccaccactgtgggctaaatggcagggtgcagttcagaatccagaggtgctgctggccctgcaccatacctccaattagctttgcatggacaagctcccttttcttctggtcgtggggcttggtcaaacgaataccaggatctctgcttcctcaaccagtccgcagagcagaagaaaagacagcagcagctgctggccgggtactcgtttgaaacaactgtcactctgaaccctcctgggtttcggggtttgtttttttagcagcttttatcaaataagaactgtgggcccctcttctgtttatttgtgctgtaaatagagaggggacatctgtaaacagccccttggtcagctccctctggtggcagccggaattggattgtttaaggagtgtgtgtgtggagtccggcttgtgagcagtcatgtgggtctttggtttgttcctcttttacaggtcctttcatttcagtctttgcccctgcttcctgtccttcaccagctctaagtgctgctgtgtgcaagtggggaacactgcacatgaggtccttcctcccagcgctgtagaggcccctgcagcctccctgtgtagcacaggcctacctgaggcctagcctactggtgctgcagccaacagagtgggtctatggtctatgtctactggttcccaagcatgagctgggcagaaaggagggcttaccttctagacccagaatcaccaggccctcctatgatcctgggagccttaggcagactaagtcaagagccaggacagctctggagtttccgtgtggggatatcgaggtgcgatgtgtgggtttaacttattagccagcaggcttccccagtcacctgcctctggctgcgactgagcccagtgttcaggcagcctggcttccacatgtctgtttcttagtggtggggtctgggagagctgtgaagattcgtctttgtatacatactaagcaacatggacagttgggttcccagcagaggccagccattacctgtgggtaaggcaagcaaacaccggatctggctggcccttaagccgagacacctgttccatgcctcccagtgtggcactgtaatataaaccccccactaacctgtctgacagtgcatcttcctacagacagaacaagcgcgcaacttttatatgaaagaaaaataaacagacaaaagcccatctgatgccatgtctgtgtccaggccttctgtatctgcatcgggccagtccctgctgtttgtgacctaggtggaggggaggggtacggtggggcctgagggctctggtaggcattgggaacccatgtgcaggagagagctgactcctgcaaatggtatgctgatggccacacacagattcacacaggaaggatagaaataaatgcacaagcaccatccacacccaggagtcatgccaccccaccctgtgagagtggctttaaaactctgccttcactgtgctcctgagggtcattcattcctctgtctttccgaatacaagtgctgaggaagaccaagtgattttcagacccatggatgtcctcagaccctgggaatgaagtaccacacccaggaggtcacagccagcacctgactctacagagctggagtcaggctggagggatggctcagcggttaagaacactggctgctcttgcagaagacctgggttcaattctcagcacctacaatttctaactccagttacaaatctgatgccctcttctgctggggacatatacctttccttgtctcaaaaaaaaaaaaaaaaaaaaaaaaaaaaaagaataaaataatgtattaaagtcaatatagttaccatagcaatagaattcattttacaacttatgagttgatacacgaaaaccacttcaaaatctgacatctgtgttattttttggagtgcttaagaaactaggactacagcacttgattaatttttttacagaagtgaagaattgaaaggcagttcagcatccacacttccatcattctgggatcaaaaggcaatgtgtgcagttctagccagtgcaacaaaacacgaaaaacacaattaaacactaaaaaggaaaacagcaaaatatagggatttacagcatcatgcaagcaggaacttcagcagatgtgtcaaactacatgggcttaaaatggagagaaaacagggctttagttctaatagcatcgaagaaacacggaagctgatgagtctgctagatccacacaggaaaccatcaagcactcagatgctgtaaaagacccagatggaagggctgagcgtgtagctcagtggcaaggtgcttacctagcatgtgtgtggtcgtaggttcgatccccagtgagtgctacagcacttgcaaacaatcatattcataaagtgtctcattttatgacctagtattataaagatgtcagttgtcagatgtacactgagcctcagctacacactgagactcccagagtagtcatctgaactcagctaatcactggtgtaaggcatttactgttaaaattgcagtagagtgtgtgtgtgtgtgtgtgtgtgcgcgcgcgcacgcgcgcgcatgggtctgagtgcaagcacatgttatttgtgggtgcatgcacataggtctgtgtgtgtgcatgtggacgccagatgctaacatcagatgtcatcgtcagttctccacttttggcttatttaagatttatttttgcccatgcttctaatctcagcacttgggtagctgaggcaggcagatctctgagtttaagtcaaccctggtctacctaatgagtttgaggacagctggagctatgctcagaaaccctgtctcaaaaaaactaaacaaacaaaaagataagatagatagatctatagctatctgtatctttatagatattcttgtgtgtgggcattgtacttgcctgtatttctgtgtacatgtattgcaggtgtccttaaccactaagccatctctatagccagacagatcttttttttttacatttcaaatgtcccccttcccagcttcccctccgcaaaccccctatcccatccctcattcccccttcctctatgggtgctcccctacccacccactcctgcctcactgacctagcatccccctactctggagcattgatcctccacaggaccaagggcctcccttcccattgataccaagtaaggcagtcctctactacatatgcatctggagccatgggtcccaccatgtatactctttggttaatggtttagtccctgggagctcttgagggtctgtttagttgatattgttgttcttcctatggggttacaatccccttcagatccttcagtcctttctctaactcttctattggggtccctgagctcagtccaatggctggcttcgagcatccacatctgtattggtcaagctctggcagagcctctcaggggacagctatacaggggtcctgtcagcaagcacttcttggcatcaacaatagtgtctgggtttagtgtctgcaaataggatggtccctaggtggggcagtctctggatggcctttcttcagtctctgctccactctttgttcctgcattcctgtgagactggtcacggcagaactcctgagggtcaagctgtctctgggtgtgattggggtgtggagggatgtactacagggtctactctggggcacaaatgcaacattaatctttcctaacatgtctcaaagattgcctgagttcccctcatggaaccctgcagcagtgcttagagcatatcccattggaccatgcaagcttgctcagctccttagagcacatcccattggaccatgcaagcctgttcagctcgatgatcagtagttttcattttcaacttaaaaaagtggttacagataatttttgtacatgtattttgcatccagttactttactaagttgccctctgatttttgtatttatccattcatttgtttgtgtttgtttgatggtatcctagctgcagaatcatctcttctggttttcttttcctttaacattttttaaaatttattttgcatgtgtgtatatggatggacaggcatgcacacaccttggtgtccctgtggtgctcaggggacaactctgaggagttggttttctccttccaccatgcaggttctggagggtcatcagacttggtggcaaatgcctttacctaatgaaccatcgcccttttatctgatgaatattcgtacacagtgcagagccggtccccactttagctggtgactattctttgcatacagcactgccttccatctctgcttcccacactccagaccctacttcttgttttcatatcagctgcaacttcacaacagcatcaagtggcagccactgcagctttcatggtgagatcctggcagtgttggtgatcaccaagcaaggtatcctgaagcccaaaggtagcaagaagcccattaatcatgcagagcttcaggctgccattgccggccccacagcagttccatgcaattccccaggtgactcacacacctccaaaggggtgacttgtttgtttgcttgcttgcttgtgacagggtttctctgagtagccctggctgtcctagaactagccctttagaccaggctgggctcgaactcacagaggtctgcttgcctctgcctccccgagtgctgggattaaaggtgtgcgccatcactgccctgctcacagtgatttatgtagaagatgtgtgagaacagtgtagttgcctgatgagaggcatctcccaggcccccaaatctcctcctctttatggctgtcatgcattttaaaggtcaagtcccagagcagccctgtgtcctgctgactctcttattccatctctgtccctaaacgaggctctagagatatctctagggccccagggactgtggctgcaggctgcaggacctgaaggcaaggccaggctgcatgggagacagctgcttatattataatcctcccaggtgtccttctcacagatgggacccctgtgacagcagtctgtctcacagccagatggacttgaccccagcacatatgagaagggctgtgatttgttctgtaggtgtctcatacagtctggggtggcctggcctgagagcactcactccccagtaacagcagtcttttctaactggggacccagctaatcttcttgtttatttttgagacagtctcatatagcccagacttgccttcagcttcagtgtagccaagggtgaccttgaacttctgttccttcggctcaaggtttgggaatacaggtatgcaccgccacaccccgtctgcgtaatgccgggaatggggcacaggccattgagcaggcactcagtcaacacaactgcaactttttggctcacctgtttgcagccgtgactataaagacagaatgagcaggaagctagggagagacagaagccaaaagtctcagacaggtgtccaatagagcagtaaagagaagagagagatgtttgtaaaaaaaaaaaaaaaaaaaaaaaaagtggatcttgggaaatgaggcatcctatgtaccaaagcccaagtgctcaggcatcagactgctcagaggagggcaggcgagagacctgggactcaactgcacacagatggaagacagaaggtagtggcaggcagctctgccactttttgttgactgacagtcctagcctctcccagcatgggcaagggtgtaagaccaagcaggaattcccagggagagtgaacactgactgtagccagatcctgagcagggctggaggtagccatgtccttccacagactctgaagacagtgaggtcttcagttttctgcgttctccaagagtaacggtgaaggctgacatcccaggaagacttccaggctgcgtgggcctgtgtccctcaggatcctacccaaggcctcatggacagggcttttgaacccacctcccctttgccctgtgtgagcaacagctggctactccaatggggaccagggtccacagaaagggcacagcctagcctgcaagttctgggattcagggaaggtagagggccaccaccacatagatgacccagctggtagacacgaagaccccgaagagtaggctgaagagcacaagtgagcgggccttccttgaggcttcctctgcctgggccaggtcaccccggcccagggctgctcgagtctgtaatgagacaggccaaggtgggatgtgccaaaaatgatccccctctacccgcccccaagccccaccagcacacccaaaaggttaggcccaggccacaggccagaaactgacattctgagaatgttgggaaccaaagcttgtagaggcgcaggagtcatggaagaggtgcctcacgcatgagcaatgcacccaagcttggctcacaccacccagcagcagccctcagatctcattcccccccaccccactgtgctggggctgaaagcccagcagacttaaatgacctccctgggccacagctgatggtaaagccacaagccactgtcttacctctgagctgtttgctcccctcaggtctgactagtgatgacctgggcctgagacctcccgctacttcccagcaaggccaggctgttacttgtaagcatatacatgcgtgcgcacacacacacacacacacaggcttgccttctgtcagaatgttaagtcacctttatcagtgagtccagtgctgggcatatgaacagtaaggaggggatggggaggaggggagctagtgaggtagaggtggagggagctatgcaaatgagtgaatgaacatggagagggcaggtaagtagagactggaaggtgagtaagcaaagaggcagatgaattaatagatgatggatgggtgaagagtgggtagctgaatgatggagtgatgtgtcttagtgggtgggagggtggagcgatggattaacagatgaatacatgcacgatagcaagatagagtagtgggcaggcagatggttgccagacagcagggcagctgaggcagccagaattatatgcaaactaaaggatgctgaaatacaacaccttgggcctcatccatcacttatacatttttttgtttcagaaattgccatcacagatcccgggtagtgaggtcacaggtaaaaaagggggaggggaggggggacagaggagaagggccaggctccatccaacaaggctcacccctgggtccggctcggttgccagctgctggctgctgagtgggacccctacgagtccccacaggggaggttgtgtcttatgagtgtgtccctccaggtcacctacctcatgggagtagacaatggcaatcatccccgtgagcaggcaacagaacagggtcaccagcaccgactccatcatgaagtccttgggcagaggcctgtgctccacttgcacgggagcaggcccgccagccacggggctgccatactgtggggtagaagcagggaaagtcacgctgacccacttcccctccgcacacccacccatgctgaaggaatcctctcatcctgccctacacacaatgtagcccagaactggctaccagatgtcttatctgccggggattgtgaaggctcagagtctccactggcaaacctatggctgcctgctttcatttcatcaatagggtggatttggctggactgaaactctgaaggttcaccagcctgagatgagaggcttctgctagagttaaaggcttgagtcacctggttctagcacttaagagtcagaggcaacaggatcagttgttctcaactacatagtgagttccaggccagccagaactacatgagaccttgtctttaattttttaagttattattattattgttgttgttattgttattattatcattattattttcgaccaggctattgcctcatgtccacccccttggggccttcaccactggtatcacagaacacttctcagaacactggccaccccgcagcctgtgccatgcccagtatcctcccttcctggtccttgggaactctgttccttatctcctcctcctgccatggagccttgtgctcaccgtggggaacgggaaggaggctccaccagggggtgggaagagcgggccggtgggtggcgggtagagggcagcgggccccggcgccggctggaacagcaccggcacctgcggaaagggcgggtagagtagcgccactgccttggggtccggcggcgcgtagggtggaggctcgcccacgaagccgatgggcggcccagtactgccagtggccttaggcccgggacccgcctcgccggacacagacgcgggttctgggtcccccagggccggctcgctgccttctgcggcctcggtccgatcctcctctggccccgcgtcttcttccagcagctgcgggcggcgtgggagctgcgggagcgatggctgcgcggtgctgcgctggtcctcggcagcttggggatcctcccggcctgcggagctgtcgccccccttagcgtcgggacctagggagaaaggcagagctgggagtcagggtcggagagatggattcgttggtgctgtgccttctgtgcaaccatgaaaacctgagttcaatcccagaacctgcataaaaatcaaggcagaagtttgccatcccaggggtggagacaggtgggtcccggggttcactggccagctaccttaacctaatgagagactcaaaaaacactgtaggcagctccagaagagtcatttctgaggctgacctatggcctcccctctcgggaagaaaattaaggacaaaaaaaaaaaaaaaaggttcacaatggaaagggtaaaaggttatgtgtatactttacactttttaaaaaagtatgcattttatgtgcatgagtttatcatgcacataaaatacatgcagtgcctatgggggccagaagagggcaacagattttgtgatggttgtgagctgccatgtgcttgttgagaattgaacccaggtcctctgcaagagcagccagtgcacttaacccttgagccatctctccagccctggccaccctttttgaaaagcttgccgccgggcggtggtggcgcacacacctttaatcccagcacttgggaggcagagacaggcggatttctgagttcgaggccagcctggtctacagagtgagttccaggacagccagggctacacagaggaaaccctgtctcgaaaaaccaaataaataaataaataaataaataaataaataaataaataaataaataaatagcttgcctctccagctgattatacaaaagtcccctgagccactgaaagtgagaacagggggtagattaacctcccagtcctgagccccagactcggccacaggagagatgtggggcagaactgggatagtccagtctgtcctgctgagcccaggataaaggaatggtcttgcagtaagagggaagattctgaactccatgagcactgcatgtgagctgggccatcacctgattcctttgcccttgactgtctctggtcctagaggagcctatgtcctgaacaatcaggaatgctttgaagctctagaatcaacaccccacccaccccacccaccccaccgannnnnnnnnnnnnnnnnnnnnnnnnnnnnnnnnnnnnnnnnnnnnnnnnnnnnnnnnnnnnnnnnnnnnnnnnnnnnnnnnnnnnnnnnnnnnnnnnnnnnnnnnnnnnnnnnnnnnnnnnnnnnnnnnnnnnnnnnnnnnnnnnnnnnnnnnnnnnnnnnnnnnnnnnnnnnnnnnnnnnnnnnnnnnnnnnnnnnnnnnnnnnnnnnnnnnnnnnnnnnnnnnnnnnnnnnnnnnnnnnnnnnnnnnnnnnnnnnnnnnnnnnnnnnnnnnnnnnnnnnnnnnnnnnnnnnnnnnnnnnnnnnnnnnnnnnnnnnnnnnnnnnnnnnnnnnnnnnnnnnnnnnnnnnnnnnnnnnnnnnnnnnnnnnnnnnnnnnnnnnnnnnnnnnnnnnnnnnnnnnnnnnnnnnnnnnnnnnnnnnnnnnnnnnnnnnnnnnnnnnnnnnnnnnnnnnnnnnnnnnnnnnnnnnnnnnnnnnnnnnnnnnnnnnnnnnnnnnnnnnnnnnnnnnnnnnnnnnnnnnnnnnnnnnnnnnnnnnnnnnnnnnnnnnnnnnnnnnnnnnnnnnnnnnnnnnnnnnnnnnnnnnnnnnnnnnnnnnnnnnnnnnnnnnnnnnnnnnnnnnnnnnnnnnnnnnnnnnnnnnnnnnnnnnnnnnnnnnnnnnnnnnnnnnnnnnnnnnnnnnnnnnnnnnnnnnnnnnnnnnnnnnnnnnnnnnnnnnnnnnnnnnnnnnnnnnnnnnnnnnnnnnnnnnnnnnnnnnnnnnnnnnnnnnnnnnnnnnnnnnnnnnnnnnnnnnnnnnnnnnnnnnnnnnnnnnnnnnnnnnnnnnnnnnnnnnnnnnnnnnnnnnnnnnnnnnnnnnnnnnnnnnnnnnnnnnnnnnnnnnnnnnnnnnnnnnnnnnnnnnnnnnnnnnnnnnnnnnnnnnnnnnnnnnnnnnnnnnnnnnnnnnnnnnnnnnnnnnnnnnnnnnnnnnnnnnnnnnnnnnnnnnnnnnnnnnnnnnnnnnnnnnnnnnnnnnnnnnnnnnnnnnnnnnnnnnnnnnnnnnnnnnnnnnnnnnnnnnnnnnnnnnnnnnnnnnnnnnnnnnnnnnnnnnnnnnnnnnnnnnnnnnnnnnnnnnnnnnnnnnnnnnnnnnnnnnnnnnnnnnnnnnnnnnnnnnnnnnnnnnnnnnnnnnnnnnnnnnnnnnnnnnnnnnnnnnnnnnnnnnnnnnnnnnnnnnnnnnnnnnnnnnnnnnnnnnnnnnnnnnnnnnnnnnnnnnnnnnnnnnnnnnnnnnnnnnnnnnnnnnnnnnnnnnnnnnnnnnnnnnnnnnnnnnnnnnnnnnnnnnnnnnnnnnnnnnnnnnnnnnnnnnnnnnnnnnnnnnnnnnnnnnnnnnnnnnnnnnnnnnnnnnnnnnnnnnnnnnnnnnnnnnnnnnnnnnnnnnnnnnnnnnnnnnnnnnnnnnnnnnnnnnnnnnnnnnnnnnnnnnnnnnnnnnnnnnnnnnnnnnnnnnnnnnnnnnnnnnnnnnnnnnnnnnnnnnnnnnnnnnnnnnnnnnnnnnnnnnnnnnnnnnnnnnnnnnnnnnnnnnnnnnnnnnnnnnnnnnnnnnnnnnnnnnnnnnnnnnnnnnnnnnnnnnnnnnnnnnnnnnnnnnnnnnnnnnnnnnnnnnnnnnnnnnnnnnnnnnnnnnnnnnnnnnnnnnnnnnnnnnnnnnnnnnnnnnnnnnnnnnnnnnnnnnnnnnnnnnnnnnnnnnnnnnnnnnnnnnnnnnnnnnnnnnnnnnnnnnnnnnnnnnnnnnnnnnnnnnnnnnnnnnnnnnnnnnnnnnnnnnnnnnnnnnnnnnnnnttgtggagaaatccttccaccaccactgcctatagatacaggcagaccactgtatagataatagcaatcgcagtgctagggggccaaacaagtgcccagtcctggactcagggcttactccttacttagaccaaagaaccattgtcgacgacttagagccaccaggaaaagagcccgtccttccagaacgctgtcacattaatgccaggcccctgccccagttatcataacaaaaaccgcagtttccctggatcctgcctgctcaaataccgaacctgatggcaccgagataggggccggggagtaaataaatactctggctacgctgggcttctcgagttctggacacctgagcctgagg

SEQ ID NO: 1163 - DNA, 6234 bp, Mus musculus
cgcggccgcgcggagcccgccatgacggcgcgagtgtgaggcgcggcgagcaccggtccagtagagcggcgggcgcgccggcctcttatcccgcagcggccgggccgggccctgatgagcagcggcctcggcctccggcgcagcccggaaatgtccggcaagatcgagaaagcagactctcagcgttctcatctctcctccttcaccatgaagctgatggacaaattccactctcccaaaatcaagagaacaccatccaagaagggaaagccagccgaggtgtcgaagattcctgagaagcctgtgagcaaagaggcaagagacagatttctaccagagggctaccctatccccttggatctggagcagcaggcagtagaatttatgtccaccagtgctgtggcttccaggtctcagaggcagaagaacctgtgctggctggaggagaaagagaaggaggttgtcagtgccttgcgctactttaagaccattgtggacaaaatggccattgataagaaggttctggagatgctcccggggtcagccagcaaggtgctggaggccatcttacccctggtgcagactgaccctcggatccagcacagctcagccctctcctcctgttatagccgagtataccagagcctcgccaaccttatccgatggtctgaccaggtgatgctagagggcgtgaactcagaagataaggagatggtgacaactgtgaagggcgttatcaaagctgtcctggacggagtgaaggagctagtgaggctaaccattgagaagcaggggcggccatcgccaacaagcccagtgaagcccagttccccagccagcaagcctgatggccagcctgagctccctctgacagaccgagaaatggagattctgaacaagacgacaagtgtgtcaccatctgctgaactgctcccagactccaccagtgaagaggtcgcaccccccaagccccctttacctggcatccgggtggttgataacagtccaccagcattaccacccaagaaaaggcagtctgctccatcccccactcgggtggctgtggtagccccaatgagtcgggctaccagtggctccagtttgcctgttggaatcaataggcaggactttgatgttgaatgttacacccagaggcgcctgtcaggaggcagccgctcctgcggtggtgagtctcctcgcctgtccccctgcagcagcacaggcaagctcagccgctcagacgagcagctgtcctccctggacagggatagtgggcagtgctcacggaacacaagctgtgaaacactagatcactacgaccccgactatgaattcctccagcaagatctctccaatgcagaccagatccctccacaggcagcctgtaacctcagccctctgccggagtccctgggggaatctgggcctccatttcttggccaccctttccagctgcctttgggcagctgtctgcagcaggagggacagcagacagacactccacctgcccttccggagaagaagcgtaggagcgcagtctcccagaccacggacagctctggctgcagggtgtcctatgagcgacacccctcacagtatgacaacatctcagagggtgacctgcagaacccagtcccagtccagcctgtgccctacccaccctttgctgctgtcctgccctttcagcagggagcttcctctgcctctgctgagtttgtgggtgatttcagtgttcctgagttggcgggtgacacagagaagccacctcctctaccagagaagaagaacaagcacatgctggcctacatgcaactgctggaggactactcagagccacagccctccatgttctaccagacaccgcagagtgagcacatctaccagcagaagaacaagatgctcatggaggtgtacggcttcagcgagtccttctgcggtagtgattccacgcaggagctggcccctccacccgctctgccccccaagcaacggcagctggaaccaccatctgggaaggacggacatcccagagatccttcggtcagcagtgcatctgggaaggacagcagagaaaatggggaaaggtccccaaagtcactggatggtctggagtcagcgcagtcagaagaggaagtggatgaactgtccctcattgaccacaatgaaattatggccaggctgacactcaagcaagagggtgatgatgggccagatgttcgtggtggttcaggagacatcttactggtccatgctactgagacagacagaaaagacctggtgctgtactgtgaagccttcctgaccacctacaggaccttcatcagcccggaggagctcatcaagaagctgcacttcacgtacgagaagttctctccctttgctgacacgttcaagaagcgagtgagcaagaacacattctttgtgctggttcgagtggtggatgagctctgcctggtggagctgacagaggagatcctgaagctgctgatggagctggtcttccgcctagtgtgcagcggagagctcagcctggccagagtcctccggaagaacattctggacaaggtggaccagaagaagctgctcaggtgtgcccattccgaccagcctctggcagccaggggtgttgcagccaggccaggaaccttgcatgatttccacagccacgagatagctgagcagctgacactgctggatgccgagcttttctacaagatagagattcctgaagttttgctttgggccaaagagcagaatgaggagaagagtcccaatctgacccagttcacagagcacttcaacaacatgtcctactgggtgcggtccatcatcatgctgcaggagaaggcccaggaccgggagaggctgctcctcaagttcatcaagatcatgaagcacctgcgcaagctcaacaacttcaactcctacctggccatcctctcagcactagactcggcccccatccgcagactggagtggcagcggcagacctcagagggcctggctgagtactgcacattgattgacagctcatcctccttccgagcctaccgggctgctctctcagaggtggagcccccatgtatcccatacctaggtctgattctgcaagacctgaccttcgttcacctgggaaacccagattatattgacgggaaagtaaacttctccaagcggtggcaacagttcaacatattggacagcatgcggtgcttccagcaggcgcactatgaaatccggagaaacgacgacatcataaatttcttcaatgacttcagtgaccacctggccgaggaagccctgtgggaactctctctgaagatcaagcctaggaacataacaaggcggaaaacagaccgcgaagagaagacctaggagcaggctggctgtgagaacgctcaagcagccaggagaggacctggaccatcccagcctcagcctgtccatgcctggctgtgtggcagcacctgagtctcctggccggtctcctgcctccttccctatggctaaagtcccagggttcacaatgagctggctggcaggcctcagggctggcttgtgtactggtggcccctggtctggttttgttttctgttttctgtcagtgctccctcctgttccctcctctcccctgcagctggagagcagcagacacctgagcagcagaccaggggaatggcgggcttcactgtccccaggccaccctagcctccttaagtggcagataagtaggggccccaggacccttgggtagactgccctccgggaccctggagccaggggagctatggctgggagacagaagaaggtagaaagggaccacgcaggcatcttgtgctgcccacttcctgctttttaaacatggagggagaggcatgtcaacctggcccagaaagtatggtgggtggtaggcaagagccacagagctgacacttctcacagcagtggccccagctctgtcctgccatgcacggccactaaccaaggcacctgctgggctgacagcagcagcaccagtagcacctgtcgcccaccactggtccagccccagccccagccccagccccagcccacatcaccggtactctggggatcgggaagaggaggcagaagggacagttcatgctgagctggggccaagactgtgcttcagagagtgaataaggatcttcagtgacctagggagaggcaagcagcccctccgtgcttgctgtgtgccttaaatgccatctcctgttccttccaggcctgtgggcttccctcctattttgccccaccccccgcagccagcaggttcctagtccccgtttgctctctgggagtgtctgttcccaagaagtctaagcaggcctaggacgtgagggcctccagaggtttcctgattccagacaggtggcagagccaccccctgctgctgaggttgacaatctgttcagggctcagggctaggatctccctgggcatggccctgtggccaccactgtgggctaaatggcagggtgcagttcagaatccagaggtgctgctggccctgcaccatacctccaattagctttgcatggacaagctcccttttcttctggtcgtggggcttggtcaaacgaataccaggatctctgcttcctcaaccagtccgcagagcagaagaaaagacagcagcagctgctggccgggtactcgtttgaaacaactgtcactctgaaccctcctgggtttcggggtttgtttttttagcagcttttatcaaataagaactgtgggcccctcttctgtttatttgtgctgtaaatagagaggggacatctgtaaacagccccttggtcagctccctctggtggcagccggaattggattgtttaaggagtgtgtgtgtggagtccggcttgtgagcagtcatgtgggtctttggtttgttcctcttttacaggtcctttcatttcagtctttgcccctgcttcctgtccttcaccagctctaagtgctgctgtgtgcaagtggggaacactgcacatgaggtccttcctcccagcgctgtagaggcccctgcagcctccctgtgtagcacaggcctacctgaggcctagcctactggtgctgcagccaacagagtgggtctatggtctatgtctactggttcccaagcatgagctgggcagaaaggagggcttaccttctagacccagaatcaccaggccctcctatgatcctgggagccttaggcagactaagtcaagagccaggacagctctggagtttccgtgtggggatatcgaggtgcgatgtgtgggtttaacttattagccagcaggcttccccagtcacctgcctctggctgcgactgagcccagtgttcaggcagcctggcttccacatgtctgtttcttagtggtggggtctgggagagctgtgaagattcgtctttgtatacatactaagcaacatggacagttgggttcccagcagaggccagccattacctgtgggtaaggcaagcaaacaccggatctggctggcccttaagccgagacacctgttccatgcctcccagtgtggcactgtaatataaaccccccactaacctgtctgacagtgcatcttcctacagacagaacaagcgcgcaacttttatatgaaagaaaaataaacagacaaaagcccatctgatgccatgtctgtgtccaggccttctgtatctgcatcgggccagtccctgctgtttgtgacctaggtggaggggaggggtacggtggggcctgagggctctggtaggcattgggaacccatgtgcaggagagagctgactcctgcaaatggtatgctgatggccacacacagattcacacaggaaggatagaaataaatgcacaagcaccatccacacccaggagtcatgccaccccaccctgtgagagtggctttaaaactctgccttcactgtgctcctgagggtcattcattcctctgtctttccgaatacaagtgctgaggaagaccaagtgattttcagacccatggatgtcctcagaccctgggaatgaagtaccacacccaggaggtcacagccagcacctgactctacagagctggagtcaggctggagggatggctcagcggttaagaacactggctgctcttgcagaagacctgggttcaattctcagcacctacaatttctaactccagttacaaatctgatgccctcttctgctggggacatatacctttccttgtctc

SEQ ID NO: 1164 - protein, 1080 aa, Mus musculus
MSSGLGLRRSPEMSGKIEKADSQRSHLSSFTMKLMDKFHSPKIKRTPSKKGKPAEVSKIPEKPVSKEARDRFLPEGYPIPLDLEQQAVEFMSTSAVASRSQRQKNLCWLEEKEKEVVSALRYFKTIVDKMAIDKKVLEMLPGSASKVLEAILPLVQTDPRIQHSSALSSCRVYQSLANLIRWSDQVMLEGVNSEDKEMVTTVKGVIKAVLDGVKELVRLTIEKQGRPSPTSPVKPSSPASKPDGQPELPLTDREMEILNKTTSVSPSAELLPDSTSEEVAPPKPPLPGIRVVDNSPPALPPKKRQSAPSPTRVAVVAPMSRATSGSSLPVGINRQDFDVECYTQRRLSGGSRSCGGESPRLSPCSSTGKLSRSDEQLSSLDRDSGQCSRNTSCETLDHYDPDYEFLQQDLSNADQIPPQAACNLSPLPESLGESGPPFLGHPFQLPLGSCLQQEGQQTDTPPALPEKKRRSAVSQTTDSSGCRVSYERHPSQYDNISEGDLQNPVPVQPVPYPPFAAVLPFQQGASSASAEFVGDFSVPELAGDTEKPPPLPEKKNKHMLAYMQLLEDYSEPQPSMFYQTPQSEHIYQQKNKMLMEVYGFSESFCGSDSTQELAPPPALPPKQRQLEPPSGKDGHPRDPSVSSASGKDSRENGERSPKSLDGLESAQSEEEVDELSLIDHNEIMARLTLKQEGDDGPDVRGGSGDILLVHATETDRKDLVLYCEAFLTYTFISPEELIKKLHFTYEKFSPFADTFKKRVSKNTFFVLVRVVDELCLVELTEEILKLLMELVFRLVCSGELSLARVLRKNILDKVDQKKLLRCAHSDQPLARVAARPGTLHDFHSHEIAEQLTLLDAELFYKIEIPEVLLWAKEQNEEKSPNLTQFTEHFNNMSYWVRSIIMLQEKAQDRERLLLKFIKIMKHLRKLNNFNSYLAILSALDSAPIRRLEWQRQTSEGLAEYCTLIDSSSSFRAYRAALSEVEPPCIPYLGLILQDLTFVHLGNPDYIDGKVNFSKRWQQFNILDSMRCFQQAHYEIRRNDDIINFFNDFSDHLAEEALWELSLKIKPRNITRRKTDREEKT

SEQ ID NO: 1165 - DNA, 183189 bp, Homo sapiens
gctgggattacaggcgggagccaccgcgcctggccctgaaggcattttaacctggagagtgataccactgtcggtttagcatgaagacccctctggccacaatttggagaagaaattgtgagaagaaaggaggtggagccccattaggagtgactcaggcagaagatcacgaggcctgacacccaaggagagtggaggtggggctggagggcagaccaatggctcgaggtgttggtgacagtggatcccaagcccaggcttctgaattgagtaacctgtggaaagaggtgacatttcctgagagaaaaccctggaggagaacccctcctgggtttgaacgattcttgtgcctcggactcccaagtagctgggactacaggcatgagacaccacacctggctaatttttatattaaatatttttagtagagatggggtttcgtcatgttggctaagctggtctcgaactcctgacctgaagtgatctgcctgcctcagcctcccaaagtgctgggactacaggagtaagccaccacccccagccccaaaaaaactttttaaaaaattaactgggtgcggcagcacacacctgtggtcacagctactccggaggctgagatgggaggatcgcttgggcccaggagtttaatataagtatccatcaagaagagaatgagaggctggacgcagtggctcatgcctgtaatcccagcactttgggaggccaagccaggcagatcacttgaggtcaggagtttgagaccagcccggccaacacagtgaaaccccatctctactaaaaatacaaaaattagctgagcgtggtggtgcacgcctgtaatcccaactactggggaggctgaggcaggagaactgcttgaacctgggaggcagagattgcagtgagctgagatcacatccctgtactccagcctgggcgatagagtgagacttagtctcaaaaaaaaaaaaaaagcagagaatgatcaaatacatttttatacattcatacacttgaatgacttaaaatatccaataggcttatacttgctagcatgaaagatgttcaatatattaatatacttaatgaaatatgcaagtcttagattgcattggacaggataggtgaactgctataacaaatccagtaaagctacatttctttctgatgtcacagcccaaagtaggtccactgggagggggcggctctaccccagacagtcattcagggacctaggctccttctatctccacacatcatcaaagctgaaagagaaaggaaaatgtcaaccatcaggtgctggagaaatttatgagtggggcacggaagtggcaatcattatttcaccctcatctattgttcagagcacctggccacacctaactgggagacgagtccagctgtgtgccccaaaaatagatttggtgagcatttagccagcctctgtcttgctaactgatgtgtaccatttaaactcattcatacaaaacaccataaatgtgtgcatggggctgggcacagcggctgacacctgtaatcccagcagtttggaaggcggaggaaagaagatcaccttgagcccaggagtttgagaccagcctaggcaacatagtgagaccccctccctacaaaaaattaaaaaatcagccaggcatggtggcgcacacctgtagtcccacctactcaagaggctgaggtaggaggatcgcttgagcctagaaggtcaaggctgcggtgagccaagatcacaccactgcactccagcctgggagacagagtaagaccctgtctcaaagaaaaaaaaaagcgtacatggatatatttttaatagagaaaaatctggaaagatgtacattaaactgttaactcttatgagtgaaagtgggacttccagtttttattttatatatgtgtttgattttatttttaatttttatttttatttatttttattttatttatttatttatttatttatttattttgagacaaagtcttgctctgttgcccaggctggagtgcagtggcgtgatctcggctcactgcaagctccgcctgccaggttcacgccattctcctgcctcagcctcccaagtagctgggactacaggcgcctgccaccacgcccggctaattttttgtatttttagtagagatggggtttcaccatgttagccaggatggtctcaatctcctgacctcgtgatccgcccgcctcggcctcccaaagtgctgggattacagacatgagccaccgcacccggcctgattttattttttaaaaaatgagcacatatttcctgtgagatttaacaatttaaagaattgtaaaatgatagtacattgctctttagattttaagcaaatggagtttagaattctagatgttcactagggggcagaagagatgtgtgtgtgtgcgtgcgcttgctgtttgcttgtcactgtttaccagattactggcacaatttccccattcatcaggtcatctgtaaggtttacagacttgtttaaggaaatgacagcacccaggcctctcacactagtagacatcagctgtgggcccaataatctcatattttcaccaatttttgattactgtggtaaaatacacgttacataaaatttgccatctgagtctttttttttttggtagagatgggatcccactatattgcccaggctggtctcgaactcctgggctcaaaggatcctcttgcctcagcctcctaagtagctgggactacaagtatgccatgcccaggttaccttagtcttttttttttttttttttttttttttgagacagagtctcgctctgtcacccaggctggagtgcagtggcacgatctcggctcactgcaagctccgcctcccaggttcacgccattctcctgcctcagcctcccgagtagctgggactacaggcgcccgccactgcgcccggctaattttttgtatttttagtagagacggggtttcaccatgttagccagaatggtctcaatctcctgacctcgtgatccacctgcctcggcctcccaaagtgctgggattacaggcatgagccaccacgcccggcccaccttagtcatttttaagggtatagttatgtagtattaagtgcactcatgttgtgcaatcattaccaccatccatctctagaactcttcatatcttgtaagattgaaagtctgtacctattaaccagtcactcaccatactcccatacccccagccttggacaactaccatattactttctgtctctatgaatttgactattccattttaacctgatcctcaaggctgtgtggttgccttatgggtcattatcaaaaatgtgtctgtttcataccagcctttgagtacacagagatctagaggtcttctaattggcctgaatccctacttgtgagaaaaaaggccaaaactaccatgaagctgatctgctgcctgttctgctggagtcagcctgaaagatcccacatttagatagtggagtgatgacccagacatctgtcctggcctttctaaggatctctgtggacatctcttcaatatcaaggacatggacaccagaacaggattcagctgtatggaggcccaaggcatgggggaatgtgggagcctcatattctccgtaacaaataatgagcaaaatctccataaaaacataacatcgtctgggcacggtggctcacgcctgtaatcccagcaccctggaaggccgaggtgggtggatcccctgaggtcaggagttcgagaccagcctggccaacatggtgaaaccccgtctctactaaaaatacaaaaattagcctggcatagtggcacacctgtaatctcagctacttggaaggctgaggcaggagaatcacttgaacccgggaggtggagattgcagtgagtcgagattgcaccactgcactccaggctgggcgacagagttagactttgtctcaaacaaacaaacaaataaacaaacaaaaaaatgacataactgaccctatttaaagtcactgaaatatttgccttctctatttggacttgcctgatgctccaaattgaaatgaatacctgcacactcagaaagcatgttaggcacccccggctggaacattcctcacagctggtttcctggaagagctggttgagacttgaaagctctgcccccaaacacccctgaagctcttggagaccagcatgtagatcttatttatctttgtttttctcataaggcccagtactctaaagatatacaatctatgtggattgaattgaactgaacccaagatcaagcatatatgtaaaacactgtggggaggaggtataaagagaagtttgagtagagaatttgtagcaccatggttaaaacacgagctccgagcgggctgacctgtgtgagttccagccccaccacttactagaaatgtgtcttcgtgtctcccactaagccacatggagttaatacaagccatagaggatgcagggtacacctatgctaagccctcctttgctgagaactggacccacaagtgtagcctctagcagttgtgtttgtaccatgtaaccctgttgtgagcccgattctgtcactgttcggggcgccactatgtaacccgcaccgacctagggcgactgaacaaagggggcgaacacggaaataaaaggcaagagacaaaagagtatatttggaagaaggggtcagggggcaccttgcctctagtggacaagagctctgagctttacacagccctctgtatttattaggcaaaagaggtagtgagaactggggtggaagaaggggtcagctgcttggcccagagtaggcttgtaagactgcattcctcgaacaacaggctctagatgtcgcagtagatagccttggccccagggagtgattgcctccaggaaaccttctgtctgcaagagcagtcgtgagcttgttcacatcttgcattcatgataaacagtttgctgtttgatcatatagactccagtggaatgctgagttggtcacgcgtccctcaggccttcagcttcctacataaccccacccacctggccagacccaattgggccaggggtggaccactgaccccagctgggccaatcagctcctctctcctggaacttgggtttggattgagcatccttagcgggtctggtctcacggctgagctggggaaggaagtggcctcgggatgtgtgggaaagtgagtgattgttacgtgcagttcagttgctggcgaggtattgaatttcctgccctttggttctacctatgagacattctttttttttaccaatagattcccctttgccaacattaagtaggtatctacaacacgtgaccaaacaaacactctcttatctagaccccgccctcccaggattcatgtcaggattgaggcagtgactgagcagtgcccagccacaggcagccctcaggaagcatcagccctcattcccatgactcctgttagtaatggtttcacctcctcctctgatctacaatggtgatgtaatgaagcaatactctctgtccacagggaacggacagtggtgtctgggagttcaggcaggtgcctgctaacagatcccaccaatccaagctgaggtgggcccctggccaccagcctcactctggctgttttctacccgagtctcgtggagttcctgttgtctgaatagctgagtgttgtctgcaaacgcaagaagaggatgtggcgcttttgcaaggggcccccatctaaaatagtctctgtgagcaggctcagagccacctaactatttcttccatcttccaccatggagtctggagagctgctagggtagagtggtcacctggctcaccccatccttccctggaatgttgggagaaggcctgacagcacccacccgagtgttgactgagccccttccctctgctggagttggtgctgccgcagtacaagagcccggcatgaccccttgtcttaatagggctttattttctgttatcttacaatttattttgttttcagacacaggtctcactctattgcccaggctggagtgcagtagctattcataggtgtgatcatagcaccctacaggcttgaactcctaggctcaagtgattctcttgcttcagcttcctgagatgctaggctgttccacagcctctgctcccaagttttctcacaattggcacaattcctaggctggccaagtcacatattctaccccattcctgcagtcattggcctggggatagacgtgtgactcaaactgagctaattagactctgccatggggctctctttgaaacaatgaggaaagagatcctctttgtccattggggttgttaagcaggcaggtgacaggcccaggactgctggtgcccagcttcaccctttgctaccttgtagagaaagatgacctgagaagggaaccaacatagaggaccaatggccttgttccagagcctgggttagctgcatttggacctaattgtatacctggtttactaattatgatcttcaaaaaatgcccttcttgctgtaagcaatagcagagctaggtttctgagagtgaaatcaagtttcctaatcagtacaggaggatggccctgttggggcgtgtcagggaagcattctccatagaagtgacagtgaaactaagaagcaaaagatgactgggaccagccaagtggagaggaggggagggaacattctagacagcaggagcagctcatgagaaggttccaagtcagccagaactgggctttgggaatccgtttgcttcattaccttgtgtgtgttctactatagttataaacatctttgatgaatagcctttattaagtaagttctgtgaccctgatttaccataatgtccatttgcaaagtactttgttgtttgcaaatcttttgtcattggatatgtcataatttattaaatatatttgtgttctcacaaacccctgactgcacctagtatccatgcagtctagttttctacttttcaaccaggattttggatttaaaatatcggctcttctcagctcagaagcctagaagggttgggggcagcattgagtgtgttttggggttgggcctgggaccaggggccagttttgcctggtaaggcatctgccaagagggctgaacagggccaccctggatcagagcatccattcatcaggtggaagagggaaatgaatttgtcaatctttggatttgcctttgacctctagagggctgcaactgatgaaatgatgatgggaaatttggctgccatctatgaccagctcctttttttttttttaaagagggagtctcgctctgtcacccaggctggagtgcagtggcgcgatcttggctccctgcaacctctgcctcccaggttcaagtgattctcgtgcctcagcctcctgagtagctgggactaccagcgcgcaccaccacgcccggctattttttgtatttttagtagagatggggtttcaccatgttggccaggctggtctcgaactcctgaactcaggtgatctacccacctcggcctcccaaagtgctgggattacaggtgtgagccaccacacccggcctgactagctcttagttgtggaatcggtgaccctttagactgtccagggagatgggaataagaatctctcacaacattagcagtttttcctcctccctgcacctcccccaaatcctgtccccatcactaggttatttaatttacttattttgggggaaacaggagggaaaactagcccaggtggtgcgtgctacttctttgtattccatcttagactaacaacaggaagcaggcagcagaattgccccacattggaacatcacttgcgttactaatttgttgttatttactacttgtattataggatttaactttgacttcccagctaagttgtgaactctttggagggaagcaccaattgtgcccacttttgtagggcccacagaacccgaaataatgcttagacttagcagatcctttgattcttaaatgactttttttttccttttttttttttttttttttagccagggtcttcctctgtcactcaggctggagtgcagtggtgcaatcatgactccctgaaacctctgcctccagggctcaagtgattctccctcatcagcctctcaagtaactgggactacaggcaggtgccgccgtgcctggctaatttttgtatttttagtagagacggagtttcacacattgcccaggctggtctcgaacccctgggctcaagtcatccacccacctcagcctcccaaagtgctgtgattgcagccgtgagccactgtgcccaaccacgacttttttttttttttgagacggagtctcgctctggagccaccaggctggagtacagtggcatgatctcggttcactgcaacctccatgtcctgggttcaagagattctcctgcctcagcctcccaagtagctgggactacaggcgtgtgccaccatgcccacctaatttttgtatttttagtagagatggggtttcaccatgttggccaggatggtctcaatctcttgacctcgtgatccacctgcctcggcctcccaaagtgctgggattacaggcgtgagccaccgtgcccagccacgacttttaatgaactcatttccacactagaaaagttccacagctgagccccagggtgcccttctggatgtcaaataagcagggcaggcagggtgtgctgtgtccctgagggagttgggcccaggccagcatggaggctctaggcctcaggggacatttaggcctgagtagggccaaccccagcccgggacaggtggctctcgctggcagggtgactgagtcccacatgcagggctggggtggagaatgaatcctccgccttggcatagaccttgggccagcagagggctttcatgccagagtggactcattccccggctggagcctctgggctggcaggaggtgctatgaggccactcccaggccctggtgtggggtctccaattaagaagggggtgcgggcagggtgcagtggttcacacctgtaatcccagcactttgggaggccaaggtgggtggatcatgaggtcagaagatcgagaccagcctggccaacatggcgaaaccccgtttctactaaaaatacaaaaattagctgggcatggtggcatgtgcctgtaatcccagctactcaggaggctgaggcaggagaattgcttgaacccggcaggcagaggttgcagtgagtcgagatcgcgccactgctctccagcctggcgacaaagtgagactcggtctcaaaaacaaaaaacaaaacaaaaaagggggtgctgcatctctggtttgggggaggtcaggacaggctcccagccagcagagcttgttgagtcctggtgagagtgagttctaggccctggtgtggagcctctggcccacaggggatgctgggtgcgggatgatgctagggtggggtgggcgtcagttccacgtcctggggtggaaaatctgacccaggagggttctctgtgtctctggtgagggggcaggccaggctcttgggcaaccgaggaccctgggttggagctgtcagtcccaggtctggagctggtgactctggtcccacagcagaggaatgcggagtcccaggcggggtcggccccacaccccaggccccaggccccggcgtggggactccggctcggcagggggcgctgcgtctcgcgcgtcgcgcgggaggctcgggcggctccgggcccacagggggcgctgtggcggcgcggcgggcgcccggcaggtggcgctgtggccgtggccgcggccgaggcccggcgggcgggcgggcggcgtcgctgcgctgcggccggctcgcgggccgggggagcggcggcgggcgcgcgggaggcggagcggcggcggcgggcgcggcgggagcggctgggcccgggcgggctggagcgcggtcgccgagcgcagggccgcggccgcgcggagcccgccatgccggcgcgggtctgaggcgtggcgagccagggccgaggcgagcggcgggcgcgccgcccctgtcgccccgcggcggcccggcccgggcccgatgagcggcggcctcggcctccggcgcagcccggaaatgtccggcaagatcgagaaagcaggtgaggcgcgggcgtggggcggctccctccggccgggcccggccctggggctccgccgctccccgggccgagcgcgggtcgcccgggatgtgcggccctccgtgcgccggggcggggtgaagccaccgaggcctcgccggggcgcctggcagcttctcctccaggcccattgcctgccgggcgcggggggaagcggccgctgcgggggcgccaggggccgggccgggcggggcccctgcaacccggggccgggcgcgctagccgctccgcggtccccgggaacttccgaaaatggctcgagccccaagcaggggaagaacagcccgggccgcgtgctgctgcggctgcagcgatcggtgcccggcctgggctcggcgctaggagggtgaacccagctgagctgtaaaatgtgtcatttctaacgagcttcgagtttaacgagaagcgtccacttcggttgcttcaaaggaagcaggctggatgagtgggggtattttgaggaggtagtcaagtttcccctccccaccccgatcaagctcagctctgcaaggagggcaggtgggggaccggtgggttggagtagatggtaaatcttgatgcagacctcgtctctttgtgtgttcctagaaatctgggggagttaccttccgagtccctgggtttgcctgtcctggaaatagagtctccaaagattcaatgactgtcgagcctgtggggccccaggctttattagcctgcagcaccttgcagggcaaatgcgaattcttgggtctaaggtgaagtgggcgggtgctcctgggctcctgtactgggagcatgccctgtggtcataacccaggtagcaggttagcttggcggctgaatgagggaaagcagatttttagggagctgcaaaggaggtctgtggctttgattgtggaagttgcttatgtttcctgggttgaatctgggatacttctgtggggtgcacccctgcagcggacccacaaggcaatatgacttttgcaggctgtggttgaagcacagaaggacatttttgtaggctttattgagggtttactatatatctaactcttagcacctaaaatgcattgcttcttaaatttttgaagctagtctgtgggaaagaatatggtcccagttttacaggctcagagaggttcagtgagttccggctgtccagccagcaagagggcggcaggcccctagtatattcattcctggccctctgaccagaagccagggtgcttttctcaggggcagggcgcttgggttcaggtgccatttcttgagtatttttctcactgaatttgagcccccacagccttgccgagtgaccatgagtcgccatcctgtacacctgctgctccagaaataacttgggttcatctgtgcagcatttctcaggaacttcttgtatagtgtcttgtcagaacggtactgttgggaaacttggataatttattttaaaaagaacattcactgagttcttttataagaactttataatatataagattatattatatctttttatatctaatataagattatattatgttttatatctttataatataagaatattctatgttcattgtcaaaacttggaaatcacagaaaagtaaaatgaaccggattggaaatcatctgtcagccaggtacagtggctcacgcctgtaatccctgcattttggaaggccaaggcaggaggatcacttgagcccaggagtttgaaacaagcctgggcaaaatggcgagacctcattgctactttaaaaaaaattttttttttttttttgagacagagtcttgctctgttgcccaggctggagtgcagtggtgcgatctcggctcactgcaagctccgcctcctgggttcacgccattctcctgcctcagcctcccgagtagctgggactgcaggcgcctgccaccacgcctggcaaatttttttgtatttttagtagagacagggtttcaccgtgttagccaatatggtctcgatctcctgacctcgtgatccgcccacctcggcctcccaaagtgttgggattacatgcgtgagccaccgcgctgggcctctttttttaaaaaaaggaaaaagttgcctgtcatcccatgagctgcccaaaccgctgggaatgaaatgactcttcatttgagttctctgctatttgggagaaagacctgaggccagttcatttcagcatagtttgtccttgggccttttctgggcaccgccttctgctagggggttgtagatgaaagtgcctgctcccagagaagcttgtctaacctagcacagtttctaagctacccaggctgccagaccgagcgaccgtgctgccatggacacaggtgagagaggggtgtcatgagtgcgggaatgaggaagacactggaggggacagtgtttgtgctaggctctgaagagagggctgagatatatacctggtggagacagggagaaagaggagagaggggaaggggctgaccaggagctgcggaaagtgtgggaggaagatgcattttgtgagaagcagaaaaagtaagagttctgagattggcaagaccagggtcaggacctcgcctgcagattggggattgcagatgtggagctggctggaagtccagcctccttgcagaaggtcttttgctgcagttcataggaatcatagtgaaagattacaactgccaaggaagactggggcgcgcctggagtgaggatgacctttcctggtggtctctgctggctattctcagtgaacttccctttgcatttagacgacattttgttagatttctgttggagtttttttaatggacttcccactattcagtctccagaggagtatttgattcagaggagaggcccttaggtgaagtggtggcagagcctgacaccaggcaaacaattgttgtgattggagttttgctgttttgttatctcaaagcaacagaaacgttgcttaaatatgttcataatctcctctcccggaaagtagaagaaccagcgtttttagttctcagtgcttaaggcatccagggttttttgggtaaacaggaaaccccttcacatcccgcatagtgtgcagctctggcctgttcctcatcccgcccccttgcattgcctgatacctccttggtgtgcaggactctccttaacccctgggggagatcttttgagtcattgctgttctttgggacattttctttctcatgcagcagtgcctggctggggcagggccttgaggggttcatccatacctatgtatatcctcagagaatacacaaggtcataggcctcacatttgggggtcccaagtgccatggggaatcaagacagtctgggccagagggtggcacagggacaacttgctgggctggtgggggcctgtcaagtgaggcctggtggagaaaggttgaatttggagggccaggaacaagctgggatgcaggggaggctttctaaactctacagtgcttctagagatgacgaggaggtagggagtagaagagagccggacagattagggagctcccagggtgagcttgtgggcaggcctgcagaggagaagaggctcttccctaggagctcagagggatttgttctggaagactgatgggagatgtatgcagctgtttagaggctgctttggagaacaaatgaacatggttctggttgtgcaagcagttactgtggttctttttgctcatatatcttccaataaagacattgagcgaggagagttgataccgtcatgtttttggagcttaagcacagactggcagctgcgggctggattcagtccacagatatgttgggttggatccgcacgtgttcttgaggaaaaaaacaaaagaattgatggtcaatattgaaaaatcaggaagtcactcaaaaatctcaaaagcctggttcctgatttccttgaaaaatgagaatctctggtaactctgagcgcttgttcctgcctacaaggcagctatgggcaggagtcaggtggcggacactcccacagagcccctcaccactcccacagccagccacacctccgacggcccacttggacttttgacatttgcgtttgcatcccctcctcggagaaatgattcatgtttgtttgtttttgtctggactttgaaacctttgccccatcccttcattgactcattactccatccctcattcatcagggattgagcaccggctccatcaggctccgtacaaggctctggggactcagtggtgaactcagcagatgtcgtgctgcctgccctgaatacaggcatcctctgtgtgtcacagggtgagcaggaaggtggcaagagatcagacttgcagtggggagggatggtcaggaaactcctgtgctcctgtgacaaaatgggacttaaggtgagaggcggaggatgggtccacttagctgggcacaggcagtggggtaggggaccagtctcctggggtgggagcagaccaaggcctcctcagctgaagggaagaaggtccttggactgcatgtgtcagtttcagtcactcattcctttcttccttccttcagtggcttcactcatcgcctgcctcacggagcaacctcctgagggcctggagttgttcttgttcttgggacacagcaaagatcccggcctcctgggccataccttctaactgggctggccataagttaagcagttttgtatgtatgtttttaaagtccctttccttcctctctgtgctcccagcgaaccacaggctggctgggagtttcatcatttaccagaccctcctgccagcgctgtagctcctgtcaccttggagcagttcactgggcctgctaaagtggccacaggcttgcccagcacgctgcctgaagatggaataaataggtgtctcacgctcagtgtgctacggtttcaaatgtgtgaagatgcttttattgtaaatcgaaaagaaatttataatgactgcatttcatggtcacatttttgtcatgatatattttctcagaacagatactaagagtacaggccctatgatgtagggctactcatttttgtggcctgagaaagaggtcctcttagattggcagtcattgtatttcgatcaattttaaactcgtcaaatttgtacttcctttttcctccatagttaggaatttttgtcgtcaaagtatactcagtcaagcaatgagacattttgatggcacctgctctgcctcctttcactcacccgttttaacacttactgagtgcctccttgttggcaaacaccaagtgatgcctcgtggcagggagccagcaggaacctgtccctggaggccacagtccaggggtagaatcagaacgatcttgaacatctctgcaatttcctgtggttttcagaatgcatttatagactacctcatttcatttcatcctcacaacagcccagggggtgagggcagggcggagtatccctcttttgcccctcagggcagctaaggcccagggaaatttggttgtttgcccaaggtcatgccctggagaagtggaatggggaaccggccccctttcttgcctttatagagcactggttagagcctccctggttgctggggacacagctttccatcttaattcttcaggcttctcaatctcttttctgatctttgaaaaaaaagatctaccaatgaaattaagggaggctcactacagtctttagactgcgtctgatactcgtaatactaatcacattaacagtgctgtagagagataagaaatagcactaatgccagctaagtgtgtttttagaaaaatcaaccacagcaaccccaaatgtttcctggtctccagagcagctgttggcagaggcggtttgaatgggattccttgtagccaagagaccttataggaggtctgtagagatgagtcatgtgtgagcttgcagaaaaatgtctcccaaagtagcccggattggagattgccttgagtgccaggctgggtcttacctcaggccagctgagcgtgttccccatggccaggataagatcacgctctggaaagaggagaggcctgacaacccaccgcctgccccaccccgcggccgcctcgccgccgggacaggtgttcctctgactcgtcacccgtcttgccccaaaggctgttttatgagtaaataaataaaacccaccgtttgtgaattattaagggatctgtcatccagcaggccagtcatcttagtttctggtcatctgtttgagaacatcttagttgtgtccttgggtgattcttaccctttcctggggcttattttccccatcagtgccaggaaggagtgggactcaaaaggagcgctcctctgtttgtgtttttaagctgtagccactgcccccgccaaccccgcaccacccccccccccgcccccgccccggcttttttaaattttaagttctggaatacatgtgctgaacgttcaggtttgttacataggtatacatgtgccgtggcggtttgctgcacctatcaacccgtcatctaggtttgaagccccgcatgcgtgactgcaggcccttttttatacataagaaggccattaggtaaccactaatggggaagcctctttgaatgcagtccttcctgcttagctgtggcggaggctcctccttggaccctccaccccaaacacaatgtgaaaacccacttcctcgatgctctcacagctgcctctaccaaaatcaacttcctctgggctctttgtgccttctcttcctctaacatatagtaaattccatggaaatgccccagatcaatgcttgagtagaatgatgtttcactcattcaaaatcaaagccccagtttcctttctgcaagttaaaaaatcaacaagtgaaatgttaaacagatgattagctccgtgagggagtgtgtctaccactgcggtgccattacggtgccttgaacgcaataggtgctcagtaaatacttactaaaagaatgagtgaatttagttaatattatcatagaatgaattttagtttctggttccaagtctcaaattatctttagacgtagcttattgtggtttcaaattgccaattaggatgtttcttggtacattagtaggaccaatatctgatcagtggtgtgcagttagttgggggttctgtgttttcctgtagtcctctgaacactaatgatgaggttaggatcaaattcccagaacaccattgggagaacgccaggacaccgtgaaggctgagccgccactcggttctgatgccgcatccattggtcagtgcacgttctttgagcttccacttgagtgcacgttctttgagcttccacttgagtgcatgttctttgagcttccacttgtagtgactgcctggttctttgggatgtgcaggagcaaagcgctcttaggcaatgctcgttctgccctgtgtttacaaaccaaggcctgtgccagctctactcagcctgacacccataatgagcaccatcccaggaatccctgtccctacttgttatttttttttttttcagttggcctttgaatgtgatttaggactggcttcctgcagcattactctcttttcccaggatgactgtgcagcgtgtgctgtctagggctggggtgcaggctgttggtgtgcctctggcacccccttccttctttgtcaagaggcatgggcagtattttcttgctacttccccctcctctgtgagctaaggtacagggggggaggttcatctgaatttattagaaatctgctgtctgctggtcacaattcctttctcccactttcttctcccaggctgtagtttgaaagacaggtgacaattctctgaacccaagtcccaccctgcagtctggactgctgcttcccggaacaccacgactcctgtaacagcttagacttctgtccccacagtcccttagcagcagctttctctttgcttttcactggcttgcccaaaccacacagtgactttactgcatattaagttttgtgatcaggcgattctgcagtgcttttaaagcgtagaaatggagcactgagcacaggatgctgtgtggtttgcccagggctgggttcagaggggcggatttcaggcatttgctctatagcttttaaaatttgtgccactgatgtggacctgacagatgcgattcccagccacacactgtattgttaaaaacggagcaggagtgtgacactgacagtaactgagagaaggaaggacatggaatgagaagagaggacagctgacatccagtggaatgtgaccgtgttaaatagccacttagctgaccccaaacgagcaaacaaacaaaacccctggttggaaacagtggttgtatttatttgctggttatcacatgcgcccatcctccttcaagtgatggttctgaataaatagatggatgattgttcatgagtcatggaattggctactctcaacccctcctttcaataataaatacaaataatagtagtagctgatgttcattaggcacttaccacgtgctgtaccaggctcgcttctgtatattttacacttgtggttgcatttaatccttacaataggagaaaggtactgttaactgttctcatcctacagaggaggagactaagacacagagcttttctttgagacctgaaagagttaacatttgcacatagtcatatactgagttggggcaaagttaggactaaagcccatctgactattccccatgcatctatatttttattgattctgatattattctcttggctgtgtgacttgggtgaaaatgagccttcatgtttccagggacccctctgccacagaggcagctgctgcactaacaggacaccccatcatcctgagggttccttcagaagacagctctcctcctgactgtcctgctggagctcacagggggctgcggaagccttgcttctggctgggtgaccgtgggcaaattgcttaatctcctgagcctcaggtgcctttgttgtaatttggtagggtggataaacccaccccggagccctttctaatgctggttcttcttcttttttttttttttttttgagatggagtctcactctgctgttgcccaggctggagtgcaatggggtgatctcggctcactgcaacctccccctcccaggttcaagcaattcttctgcctcagcctcccaagtagctgggatgacaggcgcccgccaccacgcccggctaatttttgtatttttagtagagatggggtttcaccatgttgaccaggctggtctctttggccaggctggtcttgaactcctgaccttgtgatccgccgcctcagcctcccaaagtgctgggattacaggtgtgagccacctcccagcctaaggctggttctttgggagtctagactgcagtatgtggggtggacttattgaggcttgttttgttgatgatttttaatggcagtaaatgttggatagcacttaactaatcatcaaaatagcttttgaaacatttttgtacacattagtttctttgttgttttgggctttgttaatttgtttctttttttttttttttttttttttgagagggagtctcgctctgttgcccaggctggggtgcagtgatgcagtctcggctcactgcaagctccacctcccgggttcacgccattctcctgcctcagcctcctgagtagctgggactacaggtgcccaccacttcgcctggctaattttttgtatttttagtagaaacggggtttcaccatgttagccaggatggtctcgatctcctgacctcgtgatctgcccgcctcggcctcccaaagtgctgggattacaggcgtgagccactgcgcccagccaatttgtttcttatcataagtatggagttgcccaagatttttcccagatgaggatgatggcagctcacatttattatttcctgtgtgccgggaacgatgctaggagctttaccttcagacgtgtgtgtgtgatttaattaattctgttcttataaagagtcagcaatggcaggtattgtgcccatttgacagttgaggaaagggaggcagcaagagggaagtgactcgccaggggtgggttgtgtattgctgagaactggagtttcacttctctccccttcctggggtctagggctgacttgccggcaccaccactgccttgggttggaatgtactctggggttcccccggggctttccagcctctctgtaggactgttaaggtggcaccacatctgcctacagatttatgaagaagcccctggtttctccattattgaagtggcttaaaaagtacatttgctgaaaatattgcatgagaatctgctttggagaaacctttcacagatggcacaacggtaggaagtggcccttacgagttaaagtagttccacccacccacccacccaacactggctgtcactgagtgtcaagcagcctgccaggggaggagagggtactgagagggctgaggcgtcagtgcccttggggaactgacagtcagccaccacctgcgttgtgtacaggagacttttgatcttggctctcacaccctcatccgtgttagaggcagcatgagcctgagctgagaggtgggagacctgcctcatggcccctgggcctgcactgatgcactggatcagtgcccctccccaaccctgtctttccatctgtgcagtgagccagtacagaacagtgtctgagagcatgtgcttcaggtcctctagctgtggctttagataccagccctcctgtgtcattgttgtgggatcttgggcatgtcactctgtcttgtctaactctcagtttttccttatctgtaaaatggggaaaatcctaacagtacctaccttatggtattgagggagaattaaacgagatgatgtacataagcatttaatcagagtctggacacataagaagtgctcgataaatcttagcttttgttcttacttcaggtcgccttctactctaaagtgaccatttctttaaaaatggtaatctggtaactaaaattcaaacctcagcactcacagagaaggggaggtccctgactattgaggtatttccttttaggctggtttgttctttctctttctctctctaagaaagctgaagtccagggagtaggtttttacaattaagtaataaacttttgaagtgatcactcgtaggaagagtagagggcaattcatttcagctacacatatcccagtgcatgcaggcagaccaggaggccctgattttaatttgagtctgtctggaaggaatgggcctgtgcttgcaggctgtggtatatgtcagagccacagcagggctgatacaccaacaggtatattttttgccctgtctcaagggacacctccccagtttctccttgcggggtgactttcggggattaattaaatcatcttcgttcagctctggaggtgaaatgatcacagagtgttgcatttgtgacagttaaaaaccacaagacattcaaggtcctcgtgtacaaagtaacttacaagttgcattgagcactgcaagaagggggatttcataccctttatttttctttcttgattaactttcacagtaaagataaattcagaaatgctgttttggtgttctgagtcttccttaacccctgctccactgggaatttcgggtatgtgaaagtaaatgtgtgtagtctccttgcaaatttgtcagtgcagctagcatgaagcacagtgctatttgcagagagaccaaagcccagtcaacccttttcactttctgtaatcatttggtcctggagctacagaacctctcaattagcataaccacactaatttgtgcttctgcctcagcttgtcaagagtgccttgcaaatattaattctctgagctcatcagaagaccaaaggcatagatcaaaagcatgcttttctgcatgatctgtccttgtttttttctgttcatgaggagctttctctattaattaccctaaatatgcaaggttgtagaatgaagcttttatatttgacaagtaagaattgggctagggacctggattacagggactcgggctagggactgcctgtgctgcaggggtgcggagttccctggcctcagcttggcaggagaaatgcacgtactgctgaggaaattctgtaggctaaagtcatggggagcgtgtgagtcatgatcaccagaaatgcctggacctgtggcatctttgggcgatgaagagggaaccagcttagcactgccacagacacaccatgtcctctggggcaagccaggattccttcctgggcctctgaaccccactctataattggagggccttgaactggaacagaggttcctgagctttttaagatcataggtctcccaggagtctgatggaaactctgtggaccttgtccccagggagaaagattcattatgtgtggacatgtttctgccaagccgtaaattcccactactatatgataagtgagaattcgcaaatacccggggtcttggaaagatcaaatagaatttttgttgtctgaaacaatcaggacttagttcagtcaggtctgagccctagtaacagtaattatgcattcccagaatttggtaaggattttgtgaaatggggcttgtaagctgctgggtggaatacctgcatggataaaagggggaaccttccccttatgggtgaggtttaaaaaaaaattatgtatagtaaaattgatgttttggggatatacagttgtattttttgtttttcatttgtgatggggtcacactgtcacccaggctagagtgcagtggtaccatcgtggctcacagcagcctcgacctcctgagctcaaggagtctttcaatttcagcctcttgagtagctgggactacaggtgcgtaccaccacacccttttcatttaaaaaaattttttttgtagagacaggtttccctatgtttgccaggctagtggggtataaagttttgtgcgttttaacacgtgtagatttgcataaccactaccacattcagaatacaggccaattccatcaccctgagtgaaaaagccttcttgccgcccctttgcagtcatacccttctcccaccctggcagcatggatctgcttcctttctttttttttttcttgagacagagtctcgctctgtcccccaggctggagtgcagcagtgccgtctcagctcactgcaacctctgcctcctgggctcaggtgattctcctgcttcagcctcccaagtagctgggattataggcatccaccaccgcgtccggctaatttttgtatttttagtagagacgggtttcaccacattggccaggatggtctcgaatgcatggcctcaagtgatctgcccgcctcagcctcccaaagtggtgagattacaggtgtgagccactgtgcccggccagcattgatctgttttttatctatacctatagatttgcattttccagaataccgtgtaagtacaaccataaagtgtgtaatcggccttttactctgtactgactttgagactcgtcaagttgtcctttttatcactggttcattcctttttattgctgagtagtattctattgcattgacataataactgcttatctgcgtgagaatttgaccttggctgactatctgtctgtttgctagaaatagacaaagatggcacaggaccaacaaaaaacaacccaattttggccgggtgcagtggctcacacctgtaatcccagcactttgggaggctgaggcgggtgaatcacgaggtcaggagattgagaccatcctggctaacatggtgaaaccccgtctctactaaaaaatacaaaaaattagctgggcatggtggcacgcgcctgtagtcccagctactcgggaggctgaggcaggagaatggcatgaacctgggaggtggagcttgcagtgagccgagatcacgccactgcactccagcctgggtgacagagcaagactccgtctcaaaaaaaaaaaaaaaacacaacccaatttttaaatgggcaaagggcttgaataggcatttctccaaaggagatatacaaatggctaataaacacatcaaaatgtgctcaacatcactgatcattagggaagtgcaaatcaaaactacaaacagagctgggtgcagtggtgcgtgcctgtagtcccagctactcagaaggctgaagtgggaggattgctttagcccgcaaggtcaagactgcagtgagctctgatagcgctgctgcgctctggcctgggtgacagagtgagaccccgaaaaagaaaattagctgagcatggtggtgtgcgcctgtagtcccagctactcagggactaaggaggggactgaagcagggggattgcttgagcccaggagttctgggctgtagtgcaccatgcctacctggtgtctgtactaagttcagcatcaatatgttaacctctgggactaccacgttgcttaacaaggggtgaactggcacagagtagaagtggagcaggtcaaaactcctgtgctgatcagccctgggatcacacctgtgaacagccactgcactacagcctgggcaaaatagtgagacccccatctcattcattcatacatacatatatatacgtacatacatacatacctaagtacatacctacctaccacagggagataccagctcacacccatgaggatggctgttttcaaaaactcagaaaatagagcttgcagatagctgaacaggtagcacagctggggaggatgtggaggctccgtgccccttctcacaggccctgcccagtgcagctcttcatctgtgtcctttgtaatatcctttatgataaatgggtaagcacaaggcagatggaattaacagactgtggctgctgtttttaaacagggtttgccaatatctgtgtgtctcttgggaggatgaggccatctttctgcaacaagggagaacagaatcacaagatctttagggggggaccttgacatttcctgtggcagatttcagtattgctggtcagaactcatttcatccatcagagttgctgtaggctttctttctaagttccttaatcatctttagccttccttggatttaccaggccgtggatgctgaaaataacaatcctggtgttttaggacaggagtggacttttttttttctgagccggaatctcgctcagtcgcccaggctggagtgcagtggcgtgatctcggctcactgcaagctccgcctcccgggttcacgccattcttctgcctcagcctcccgagtagctgggactacaggcgcccgccaccacgcccagctaattttttgtatttttggtagacacagggtttcaccgtgttagccaggatggtctcaatctcctggcctcgtgatccacctgcctcggcctcccaaagtgctgggattacaggcgtgagccaccgtgcccggccgagtggacttttttcccatgaaccctatgggcagtctgctacttcgtatgtgtatatggccttcctgaaagcatgtctgaaaattgaatatcaaacctgtatcttaacaatacactgtcagccggacactcacacagtccgatgagttacctgagtgaggatgaagatctacagctttggcatggccactcacctctgtcttctctcggcagtagtattttatgaaacctgtgtttttcactggtatcaactattccattttctcattttcactactttttataaaatattaatggcaaaatataataaagcagtcaaactctttccacagcaacaatcactgccaccacaacaaaaacaccccacagaaaataagtgttgtggagaatgtgggggaatctgaacacttgtgcgctgttggcaggactgtaaaatggtgcagccactgtggaaaacagtatggcagctcgccaaaaaactaaaaatagaactaccacatgatccagcaaagtatatacctatgggtgtgtacgcaaaagaagggaaagcagggactcgaggagacctttgtgtaccatctctgtagcagcatcattcacaacagccaaaagatggaagtgacccaggtgtccactgatgggtgaatggataaagaaaacgtgggctgttcatacatggaatattattcagccttaaaaaggaaggacattctgacatgttccagtgtggatgaaccttgaggacattatgctaagtaaaataagctagtcacaaaaagacaagtaccatatgattccactagaccgtgaggtgcctatgctagacaaaattatagcaaccgaaaggcgctgaggtggctgccaggggctggaaggagggaggaatggggactatttcagttttgcaaggtagaaaagttatggagatggctgctggtgatgatggcacattatgaatgttacttattaccactgaagtggtaataagtggtaatcactttaaaatgattaagatggcaaatgttatgtgtactttaccacagttttttcaatgtttatataattacataatttaatcttaaatatctttttaaaatttttatttatttatttatttatttgagacggagtctcgctctgtcacccaggctgaagtgcaatggtgtgatctcggctcactgcagcctccgtctgctgggttcaagtgattctcctgcctcagcatcctgagtagctggggctacaggcatgtaccaccacacctggctaattgttatatttttagtagagacagggtttcactatgttggctaggctggtctcaaactcctgatgtcaagtgatctgccagcctcagcctcccaaagtgctgggattacaggcgtgagccaccatgcctgccccccgccccgttgtttttgtttgtttgtttgttttgttttttaaatagagatagggttttgctctgttatccaggctggagtgcagtggtgtgatcatggctcactgcagcctcaaactcctgggctcaaggaatcctcccgcctcagcctcccaaagtgttgggattacaggtgggagccaccatgcccagcccatgaagcttttaatccagggcagatcctgcacctctggatggggacccagtcatcttggacctgggcctttcagctgtactgggcccctgctgtcccctggcaagctcccattcccatcaggggccgatggaagtccctgggagcctaaatgtctagttgagctctagcccctggtggtgatatagcttggcgcgtagttagtgcttggctcatgtcggctgttagtaaagactctcaagctctgcattggcttccctccgagggctctgcctggatccatcagcagcacttactctctctgagttgacaacacagatggcacttactccagagctgtttggcaggattccaggctatcgccacgttcttgagaaggtatcactggcttgggggaggggaaaagagaggacgatctaggcaaaagcaagatcaaggccctctccaagaattttccagcctggcaggccctgttaggtggcatggtaccgctgtgtgagtgggagcgccacctggagatggccacgatagggtctctgttcccacgagtatcattaacacgtctctctatgaatctgggtgataaccaattaccttggggtttttttttgacactaagacaccaacacatataagacatgtaaggcgttatcgatttaatgtttctcaggaaacaaaggagaaaatacattagcaggtggattataaaacgcaccttgatttcaaaagtgaagctgtgaaaaactacagtatccaagggagattgatttttgggacccccagtggataccaaaatccacagatgctcaagtccctgatgcaaaatggcatagtacttgcagataacctatgcatcctcccatatgctttaaattatctctagattacttacaatacctaatacagtggaaatgctatataaataggtgctataccatcttacttagggaatattgacaagaaaaaagtctacgtgtttcagttacagacacaaccatccattttttttttttgcctgaggttggttgaatccacagatgcagaacccatggctacagagggccaaatgtctgtgacttagaatcagggagatacagtataagccactgacccgtcttcgagctgaattcttcggcgactattccatacagttggtggcaatagatgcctggaacactggtaaagaagtcaggtctcctgccctcatggagcttgctgtgactgggtccaagtacacccctccaaacgagacttcgccttagactgaagggttggactctggatttttgcttgtcaatgcacctctcttctagcctcttagttagatatccggacaccagaggaaaattaccctgaggatcaccgtgctgacagagcgcgtgacagatggagggatgagcacacttcccggcttctgcctgctgtcctggcgtcattattaacagagtcctccctacccccttcgaaatgtcctgatttggatgagaaaacactgagggagtaatcattaacatctatcgcgttccacaaattcgcactggagagggtctgggtttgcagtgagagaactgcttcaggtccacagcctgttctaatgcaggtcaagtccatggagtctgcgggagggtcggtgggattgtctggggctccgttctcccatgggcatctgctacttggcatgttccagtcactcctagaagcatcaaaatctgggatggtttggttcaagaaacataaacatgtacatataacaaccagatcacattatcttaaggtaaaaatcacatcaaatctcaaattgttattctttggaatggataaaaaggatattagtatttttgtcaatttaagttttatagagaaagttggaaaaataattatatagggacacttgtcttggttaacttggacagagatttttttttctgttgctgtggaaaagatacaggcataggatttttctaagaagtttcattttttatgcaagtgatatactgtgggaggaggttaaaggaaacagccagaaagacaggtaagaagcttgatgtttgtgacaaattgataacttgcagcctgtgatgttggcaggtgttgctgacagggtcatctggggccaggtggtcgctgtcctgaggacctgccgggtacccagaatgctgcctgcctgttcggtggctctcaaacgtcagcacctggaggtttctgggctctggcgcctggtttctgattcagtaggtctgtggttgggctgagaatgagcatctctagcgagttccctgggtgacactgctggtagaggtggggggtatctttggaaccaccactcaaagtctggagaggaattggaagggtcatagggacttacctgtaagataaaaggttgcccttataataataatgatgatgatgatgacgtaacaaagaatttctgtgcagtaatgccaggagctgtgctatgtgtatttaatcctctcaaaagcactggaaggaggtgacagtggcctcattttacagatgagaaaactgaggcccaaggctgggcacggtggctcacgcctgtaatcccagcactttgggaggccaaggtgggcggatcacctgaggtcaggagtttgagaccagcctggccaacatgatgaaaccctgtctctactaaaaatacaaaaattagctgggtgtggtggcccatgcctgtagtcccagctaatcgggaggctcaggcaggagaatcgcttgaacccagaagggggaggttgcagtgagctgagatcgtgccactgtacttcagcctgggtgacagagtgagactcttgtctcaaaaaaaaaaaaaaaagaaagaaagaaaagaagaaaatatagctgtgtgggcaatagtcagatgaactattcccctaactttgccccaattcggtgtatgactatgtacaaatcttaactctttcagatctcaaagaaaagctctgtgtcttagtttcctcctctgtagaatgagaacagtaacagtatccttctcttatcgtgaggatctaatgcaaccacgagagtaaaatacacagaaaggagcctggtactgcatgggctaagtgcctaatgaacatcagcttactactatctctccgggtgacagagtgagactgtctcaaaaaaaaaaaaaaaaaaaaaaaaagccctgaagggtttatgtgacttgtccagctgggttgaagagctaggttgaagccgctgcccagtattgaaacaaacccttataaaatagagaagtagcttaataatagccccaaaaagacatcacagactgaagacttttctagtagtataagtacacgtgaacaagaaaatggtgacacttctgcttccagttcatgcttcttgtcagcagtattgcgagggaaaaacaacagtgatctaatgagccctgacaagagatggccagaagctgagcagttgggaagaaaactctttggtgaatctcactctgaatgtatattgtgccttgggatattagctgattaatttggatgacatattagtcatgataagcaagacatttacaaactaagcatccagaacgtgaaaactaaaattttgccaagcaccgtggcatgtgcctgtagttccagctactctggtggctgaggtgggaggatcacttgaacccaggagttcaagtccagcctaggcaacatggtgagaccctgtctcacacacacacacaaaaagccacaacctctaaaatttaaattatatctgaagtcacgcagtactcccatgagtaattttacagcatcaagtgtacgtgctctgtaaagggtttcatctcagccttctgttttgggctcttctgtctcctgaattgccatttgggaacaggcagcctagtcccgtggcactaagccagctagctaaacactggtccttctcaaatgcatgtttccagcccctctttaggacattatgcacctgaaccagaactcttggttctccccttcactctctgcctggtaactcaccttgggttcccctatcacagtaaataatgccatttttgatccgattgttcaggcttagaaatcttggtttggatgagaaaacaatgagggtgtccttgcctcctctctcccagcgcacatccagtccctcggtaaacccctgcgatttactccaataaatcctgactggtccttcttagtacctcctctgctgaccccttactccaggccaccgccgtttctccctggactgccccatgccttcctaaccggcttcttggtttcttctcccaactcacagccattcattctgcatttcacagccagagtgtgaactggatcacatggatcctctttatgattgcctggggcttccccacacatgtgaagcgatccgaggtcctcgacgtggcctgtgtgcgccctggactctggcccttaactcactccctgacacccctctccccgtcactgtgtcccagccacactggcttttgtgctcttcttccaggtgttcctttccctcagagccttggcacttgccgttctcttactggaacattcattccccagatattgtagggcacctgctgagaagccatggacaagagccacggtttaaaggctgctggtgccaccgtttgctgatcatgtgatcttgggaaaagttgctcacccatctccttttaaaaatcagtttctcattgataagatggatcctgcggtagggttttggtgagttcatgctggggagtactcgattggaagaactgggcaaacatgagttcctcttcctgtgtcctttgctccctatccctagctgcctcacatctttgttcagatgccacccagagaggtcagccctaaccactgggcccagaataacagatagggtgcgcatcactttctgtccctcatcccccgctctttttccccctttaaatgtagccttttttttttttttttgagacagtctcactctgttgcacaggctggagtgcagtggtgcagtcttggctcactgcaacctcttgggttcaagcgattctcctgcctcagcctccccggtagctgggattacaggcatgcaccaccatgcctcgctaatatcttgtgtttttaatagagacagggaccatgttgccaagactgatcttgaactcctgagctcaggcaatctgcctgccttggcctcccagagtgctaggattacaggtgtgagccaccgcgcctggcctatttgcttcttttttatgatattttccctcattgggaggtaagctccctgtcggctgctatttcaccagagcccagaatggtgcctggcacatagctgacgctcactaatttttgttcagtggatagtgagtacccattgtgtatggactccacacctcttaagggagacaggtgcatttttacaagcttgaggagcacagccagagtgcaggctgtgaccgtgttcatcctcatgcagctcagtgcagagggccatcagcagtgagtggctctgtcaagtttatctggaggcggggagttgtaaagggcagaggcatcacagcctggaggctgaggtcagcgggctggccaggagaggggctggagtcttccccagtgcgggcattaccccttccaatactgccatggtccaagtgaagcagaggctgtgggacccgaggctgtgggaccctcaacactgatctttgagagtccactggatgttggctgtgaggtttcctttgactcgctggagaggagggacaggagctacagtgcaggcaggcaggtgcacggctatgcacagtgtccagtcgccgtgtgaggaagtgggagatgaaggtgggaaaggtaatttggggccagactccaaaaggccttgaatgccaatccacgtacttaggacttctacctttagtattacaggaagcatcgaggggtttttattattttatttttttgagacagggtctgcctctgtcacccgggctggagtgcaatggcgcgatcttggctcactgcaacctctgcctcgcaggctcaagccattctctcacctcagccccccgagtagctgtgactacagacacacataacacaatgcttagctaattatgtttttcctttttttgtagagacagggttttgccatgttgcccaggcaggtctcaaacgcctgggctcaagtaatcaacctacctctgcctcccaaagtgctgggattacaggcatgagccatagtgcctggccacatcaggggtttaagaagcattctccttacatatttagactttccaccaagtcttccaaatttctccctttcccatactgagggctacgtttagttcctggccaagtcctgactttgtaaagaacaacaagtaaacagcttcttcagaaggctggatgctgagccctgattgcccttcagtgaaccagcctcatccatgaagcttcttgaaaagccagaaactgtctcattgggggggtccttgaaatctgaagcaagggacaggttctgagcccctgtgttttgcagattaggttgcacaagaaagatgggctggtgactttgcagttcatttccgtagattgtccttctaggcctgcctggatagaagcagcctcgtgtgggatccagcagcagtggccagtgggatgggagccagcatatgtagttgttgacacatcccctgcagacgtgggtcggcgggctagctgtgggagagcactgcaatgggagtcagtgacttggggcctctagcctcctgtgaaaggtcttttttctctggacctcagtttctccattttattgtaatgagttgggctagatcagtagttcttaacctcttttttttttttttttttttgagagggagtctcgctctgtcaccaggctggagtgcagtggtgcaatctccactcactgcaacctccacctcccgggttcaagtgattcttctgcctcagcctcccgagtagcttgggagtacaggtgctcaccaccatgctcaggtaatttttgtattttcagtagagatggggtttcaccatcttggccaggatggtctctatctcctgaccttgtgatctgcccaccttggcctcccaaagtgctgggatcctaagtacagacgtgagccaccgtgcccggccattcttaacctcttgaaactccttaagactttggtgaaagccatagacctctcttcccagaagaatgaacacgtggtttgccggcaccttaggaacccccaaagcccatgagacaaagccctggatctataaggccctgtcccatctgacccccggccttcccctgggcacatacctccagctacacagggctttcatacacactgcccctttgcctggtccagctctgctcatccttcaagtctcacccttccctgacttccagcttagattaggtcgccctgctagacatgcgtcccccaccctgaatttagcactgatcaccgggataactaagtgattcttcgtgcatgttatccgaccctccccaagctccgtgttggtatttgttgagtaaatctctgaggcccctccagctatgacattctgagactgatctataagtttgcagatgtgtcataagagagtccctgagcttgtatttcctatgacattcgacacgtggtggcctttgccttcgatgatttcctccaggcctggacaggaaagttacttcaaagcagtctcggccagactcggtggctcatgcctataattccagcactttgggaggctgaggctcgaggatcacctgaggccatgagtttgagaccagcctggcaaccaagcaagatgctatctctacaaaaaataattttactaattaaccaggcatggtggcaagtgcgtatagtcccagctagtcaggaggctgagacaggaggattgcttgagcccagcagttggaggctgcagtgagctgtgattgcaccactgcactccaacctggacaacagagggagactgtctcaaaaaaaaaaaaaaaaaaaaggcagagtctagaggaccccagaagacagaagagtgcctcccagactttctgcctcagtgctttgctaggcctgacctccaggctggtcatcgcttttgtttatattctgggctgagctggaactcacacttggaacattcccacagtgcttggcgcttcctcgtattgttgtatttttctccaggagggaagtgaccaacatcagactttcctcccagcagacaaattccatacacaaagctttgtgtgagctaccgggtacccgcctgagagcccagcctctgtttctttggttctgggtgggtgagtgtgcacattacagggatccacgagcccttcccttctgagccatttctatctaaaaaaaaaaaaaaatctccttcaagaagtgagcaccgccttgcaggatcctgactcagagttcgtctggagccaacagcgtcttgcgtgtagggacaggcactccttaaaatgtttcctacttcagtggccacaatattacccctctggcttatgtcatgttccacaatcaaaatatcattcctcctggagtccagctactcgggaggctgaggcaggaggatcacttgagcctaggagtttgaggccacctgggcaatatagggagaccctgtctcttaaaaaaaaaaattattcctgaggtacagatgtttgtaagataaattttattttaattatactaagagaatgattatttactagaatattgcagtggatcttactctgatatgggggagaaaatccctagtgagggtaaataatttttttcaatgtattgtatctaaagcttggagatttataggtaataataataaaaacagtgacagctattctcattgagtatctgctgtgtaccaacaaattttaaacatctttattttagtttagttttttagagatgggttctcgctctgtggcccagactggagtgcagtggtgtgatcacaaatcactgcagtcttgacctcctgggctcaaatgattctcctgcctcaacctcccacctcagcctcccaagtctgaattcttatttaacctttaaactacccatgaagtagacagcataatggtacacatgaatgtatgtgaaaatacaaggtgtggaaaggtttagtttctatcccaaagttgttcagctaggaagtgcccccatagattcaaaccaggccagctggccttcaaagccaattccttcacactgccctcctgcctcctctggtcatgaggaaatgggtagcagaggttttcctagccaaggataaagatttgggggctggatccagccctccaactaaatgcctagcgttgatccctgcccctctctgaggaatctgtgaaatggggaagggagtcgctggagcagatgatcttgtggatctccttgggttttacagagatttgaggcttggagtagtcatacctgaaggagtgaccttgataacacatggccaggtcgggtctgattgaaggcagttcgtacagccacagcgttctcggcgtatttgtgcaaggcttggaaactcatcacagtggctgtgcagtcagccttctgcttctggtaacagttcacttttgattcttcccatttgtgaagaatcagaaaaattttctgttgtctccctgaaatgtggactggagatgggtcgcttgcccatcttggattgcaagcatattggtctttggggatggctctatgtttttttgtttgtttgcttagtctgggacactgcagaggggatgactgtaaaagacgctttctgagctggggattagagaggaattcttaagattaggttattctgttgctctccccctccccctacccctgaacagttcacattggagttattttgggggagccatgattgagaagggttggaccacagggtcctcatttcaaagctgttctctcaaggaaaaatgtccagttcattctaaaggttcatcagtatattagttgtttggaacctaggatgcgttttttcatggaaacacagttacaaatgtgttggcccccagctgagaaacgagagagggcacacctgagcccaggttctgtaactgtgacccattgttgtctgtgtgcacaggcgccaggaggagctgccccagacacggctcctgacttcaggggcttcgcactcctgatagggaagaaattccagggcccggagtggcctgagctaaggagtggggaagtggaggaaacagcgccccagccgcccataccctctgactcttgctaggagaggagaggttgtttatggattagaaactctggttaatgcattccagggggtggggacaatcagtgtgtgtatgttggggataattctcattggtttattctgtcacctatccactcatttattcaacagagagttattaagcacctactgtgtgccaggtattctgctgtgcaactgttagttttcactggacccctctcgcgtggtgggggttccctgtgctttattccagtttgtggctgcagtttaatctggggaggagcttgcgggctctgtgagggaaacagggagcctctgcacccatgctctttcctgccacctcattggagacggtgcgacagacacatgccatttgctttgccaagtttggactctcaggccgtgattttgcaaaaatgatctctgtattggtagatcaattatgaggccttaagatcttgtagagatttggattttggtttttgtctgttttgcataaattggaaagattatttccccttccttcagaaaggaagggcctggtttaacacagtggcccactgcgcccagaaacttaacagagcattaagtgcctcttaaacttggtctctctggttctgtgggtcttttttggaatgttgtcccaaatattactccggttctatacttgctcccattttgtaccatccaactctgtaaaataaatttactttggtgcttttgactaaattgaccgaagccagatatctgccacctaagctaatgtattttccgtctacaattataaaagtgatgaagggctgggcgtggtggctcacgcctgtaatcccagcactttgggaggccgaggcgggcggatcacttgaggtgaggagtttgagaccagcctggccaacgtggcagatcccccatctcgactaaaaatacacaaattagctgggtgtggtggcgcacacctgtaatccagctattcaggaggctgaggcaagagaatcacttgagcttaggaagcagaggttgcagtgagctgagattgcaccactgcactcctgcctgggtgacagagtgagactctgtctcaaaaaaaaaaaaaaggtgataataggcacagtgcagtggctcacacctgtaatcccaggactttgggaggctgaggcaggaggttcacttgagaccaggagtttgagaccagcctgagcaacatagggagaccctgtctctacaaaaaaatttaaaaattagccaggcgaggtggcatgcacctgtagtcctagcttctttggaggctgagggaggaggattgcttgggccagggaggttgaggttgcagtgagccatgattgcaccactgcacgccagcctgggtgacacagcaagaccctgactccaaaaaaaaaaaaaaagttaaatattcaccagggacctcctgagtgtcaggcagcatgctacgtacttcacaaatgttctcttttgtttgattcttattacagctgaggaggtgagactggaattatgcccagttaacagataaggaaactgaggctgctgtgctcaactggcaaagccaaggggaagagctagtatttgcacccaggctggagtgcagtggtgtgatctcggcttactgcagcctccacctcccaggttcaagtgattctcctgcctcagcctcccaagtagctgggattacagcttcgtcccaccacgcccggctaatttttgtattgttagtagcgacagggtttcaccatgttggccagtctggttttgaactcctggcctgaagtgatccacacacctcagcctcccagagtgctgggattacaggcgtgagccacctcgcccggctcagagcctgcattcttacccatattatgctgtggggattctttaggggcttttataacctcaaactctgggactgaaataaatgaaatcttttcatccacctcgacattgtcttcctttttaccaagaatatgtgattgatttcattcccttcttttcttctagaaaaccctttgttcagaatttaggtagcgtagcactttctccagcaaaattgttcccaaagtgcagtgggagtttggagcttggggttataaattcttagctgtatttgtccccaaggtgttttcttctttggagactgaggtgtagcagtgttttgatgttttgtttcgttttgtgtttcccttggaaacacagcattagtgaaatcagcttgttttctctgacagtacttgttacgtggtgcacactggtctgagcgtgggactctgaaatagaaggcgtggcataagggtctgtatgaaaatgtttctcctggcatgccccagaatggttcatttatgactttcagcattttgatcacctgattccccatttctcctgcggagaaaagtggtattaaaagtatttggacataaaattcatcttgcaagccgctgttgtgctgatgagtaataaagtgtcaaaaggatgctgaggaaagagcttcttaatatagaccatgcctgagaggcaccggtagggcgataacaagccctttcttctgatttcctccctggggccaaagggattttgaaaggcagaaggcaaagacttgagaatgagattcctcaggcttcccttgtgaggctgcctgggttctgccgctgggtggtttgggatgtccaagagatatcccctttcagccagtgactcggtcctcagttgctgctccggaaagacgctggggctgggaagggccctgtgtcctctggctttaaaatgggcaatgctattgaaaaacagaagcccttgaaacgaagtcatctgtacccctggaaacaaggtaagaaagccctgggcttcctttccaggaagaagcaaggaggcagttttctctgagagactggcccagcagcagagctgaagtgcctggggaatcaccttccagagcagaaagcacaggtagtccaacatgatttcaagaaaattcacaattctcctgaggaataagatgattcctctctcaatatgatggcttggtttggctgagagtttagttcagctcgagatgtttcatttggtgcagtatgtgtctgttgaaaatttttattttttttgaaatggagtctcgttctgtcgcccaggctggaatgcagtggcatgatctcagctcgctgcaacctccgcctcccaggttcaagcaattctctgcctcagcctcctgagttgctaggattacaggcacccgccaccacgcccagctgatttttgtatttttagtacagatggagtttcaccatcttggccaggctggtcttgaactcctgacctcatgacccacctgtctcagcttcccaaagtgctgggattataggtgtgagccaccgcgcctggctgaacatttttacttttttagaaatgttccaagtcagccaggcacaggggctcacgcctgtaatcccagcactttgggaggccaaggtaggcggatcacttgaggtcaagagttcgagtccagcctggccaacctggcgaaaccccgtctctactaataatacaaaaattagccaggcctggtggtgggcacctgtatttccagctacaggcataaggctgagacaggagaatcgcttaaacccagaatgtggaggttacagtagccgagattgcgccactgcactccagcctgggtgacagagtgaaactgtctcaaaaaaaaaagaaagaaagaaagaaaaagaaatatcccaggtcaaagctttgatatctaggagtttgaggcttttgtgatattttttgatttagataatgttattaacagcttttaaatatatagcacttccaaaagttccaaagtactttcaaggtactttctgtaaaatctttcatttatccatcctggacacccaggaagtgggacaacagcctctcttaacacctactctgtctctctagggcttggggtcatgtcagcttgaggaggaggaagttggcagggccacagagcagtgcagtggtacatttggagctcaaggacctttaatagtgtctcagtgcaggacagtctgttgacgcactcagcggccttttatcacagttattgacccaggagaccggccggctggcaggcatgccagagatgacatatgcgagacttcaccaggtctttgcctcctcttgccagaagaagttgcggtagcatttgatcagtagcaagacagttttttcacaactgcatatatgggtgtgtttatgaaaagaaaacaaataactggaagaaaatgcatggaaatattaagagcagttgctgtttgtcaaatgatagatcattttctcttaaaaagaaagtaggtgggatgctaatttactgtcaggttccagcccttctgactttctgtgagtcattcttttgtctaacatgttactttggaaagggtactccttagcaatccttgattggatccaagtttgaacaaaacggctattaaagacattgggggacagttcgggaaatttgaatatgaactccatggtggattataatgaggaactgttgctcatgtgattatgtgtgaaacggtgctgagtcatgtaggagtgtgtgcttttttgaatagtcatgctgaagtatttaagggtgaagagttatgctatctataatttactctctaaaatcataatcactctgtgattttccctgtatacacgttaataaatttgtatgccttttctccaattaaaaacaatactgtaatcccagcactttggaaggccgaggcaggcagatcacatgaggccaggagttcaagaccagcctggccaacatgataaaaccccatctctactaaaaatacaaaaattagccaggcgtgctggtgcacatctgtaatcccagctactcgggaggctgaggcacaagaactgcttgagcccaggaggcggaggttgtagtgagctgaggtcatgccactgcactccagcctgggcaacagagagagcctctgtttcaaaaaagaaaaaatcaaaataaaaaaacaggttcagcaaaatatactgtataaataaatggggacctaagataagcaaaatgggataagtttaacaagtgttagagtccaggtcatcgatatatgaggtttgttatactttctttcatgtatttttacacattaaaataaagaaccagttctgactgtgtcatacatagtacagtgtcttcagaatgggccttagcagacaccggtatttactgaagcagaccaagatgcggtactcttctgaattcagcaccgtgtgggctggtgtctccagccagccaggagaaaatcagcattgatccaactacttaaaagcaccacttttagaatagaaatttaatatgtttacttacgtttggattgtctctggttctccttagaaaaccatgagttaaaatgtctgaagattttcattggaagcagctgggtatacagacagacaggtttgatgttttattttgtggttttgtttagttgtgttcagtaatttaaatgagaagagtggtaggaccactgttggtagtagggatttcaagatccacagtgaattggagattaaagaagagaacagagcagttctggtttttaagccttcacaggccccactgaccaggagcacatctttggcgcatagggttttatttgtttgggctgatagacccggggactgcggtccaaagtccatctcagaaggaaaagccgtttttcatagcgcatggtgtcctgctgaagagccgaaataacagggatagggagtggtccttcacagtttatttgtctttttcttgaaaggttgcttacattttggaaatgggattatagaacagtgtttacaaactggaattaaagattcccaggcacactggatgcagtggctcacacctgtaatcccagcactttgggaggccgaggcaggcggatcacttgagttcaggagttcgaaaccaagaccaacctgggcagcatggcgaaaccccatctctaccaaaaatacaaaaaattaaccaggcatggtggcgcgcgcaagtagtcccagctactcaggaggctgaggtgggaggattgcttgaacctaggaggcggaggttgcagtgagtcaagattgcaccattgcactccagcctgggtgacagagcaaaacccctgtttcaaaaaaaaaaagaagaagaatgtcagggcaccaccatgaccctgatctgcagcccacattcaacgtggttgtgaaatcttggtgggtggatgatggccccaggttccagggcaaagtagcatggtctgtgtctagtttaggaacaagtgaatgggaatcctgggcatatcgttatgtggatttgctacagacagttgggacagaccaggcggcccctgatttctgcccggattcccctgtgttaggagctctggagaataagactttaaccagagccaaagatgatcatgattaggaagggcaggcccagagtgcattccaaaggcaaatttaaaggaaactgttatctgccatttagatcatttacgtgtgtttccatgtcctacacctggggagttgaaaagccgcagaggcagaacactagtgtgaaaaacatgagtcttacagcctccacctgctgtcaccctacagagcatttgatgcctgctagagaagcttctctagtgatttgagacagtgtgggacacatacccgatgaggggaccattatactgtctgacttatggttctggtttttattttttgatagctctcaggaccaaccccaaacaagaaaatgttttttacattaatggatgcttctcgtggtcgagaaatctgactcatttgtattaccgcagtgagttccagcaggccccaaacagaaaaaaataagatggggagtgggacgaagcagtggctcaagtgtgaccctgagagttccagccagagctgtggcccagcctgctctctgaccttgaacagatgcattttctaaggccaaatgccctcgctttcctcgtctacagtggcctgttccaaatgactgcatcttattgtgttatttaatttacatccatggttttttttttttaattgatctgtttaccacttgattgtaaaccacctgagggcgggcagtcgcagggttcattgttttgtccccagcacttgcacggtgcctggcacatgtgccctctgtgagtgctccctggctgcagtttccctgctggtataaagaagggtaggcttatgcagggcatggtggttcctggtgcacagtgcacagtggacgtgcaataaatagtagttaccagtgccagcaggtgtctttgggacttggaaggtggcaggtggttatttgggacctggaaatgttcattcttagcctttaactgcccaaagtagtaacactggagaatgaaaataggtacaccttcctctatcccacagcaattctgagtttacaaacagtaaatgtgttgatgattgttcagttgcaaatattacttcacaaaagcccctcctaaagaatcaacatttagttgttgattcatacagctggaggaaactttgaaatttagagctaaattgaacttctctgaaataggcttataatcctgccctcccagaggtaggcaggcaggcaggcaccctgcctgactggctcctttccttctttcctttcctttcattccttcctttcctctctttttttccctctctttcgaaatgatttgaagagttgcttacagtgttcattttggctctcgggagtacagcactgacagaagtttccttgggaattaaaaattgcagcagtaattgcaaattgaattgttatctccttcaaaaatcccagcagctccaggccataccagcctggtaaatggaaatgttaatgatttgcatgtttgtacacagtgtgggtgtgagcgaatgaaattaacacccttagtagaagagctgagtataaaaagcttcagcccacagaccttggcagattgtgggatttgctgtgctggaagcagattggcaggcccaggtggggctgggggtggcagggggtgagttaaggatttgcctcagttttgaatgccagtggttgctctgccataggggcaaatttagaaatgtttggattccagccagcaaaggtgtttagacttgcctctgcacactagatagcaaagtagcatctggggcagctggatgcccgtgtgccagctaattaatattgatccagaatgcacaagggctgggtgctgcaataaccaccggctcagtgccttctagctaataagtaagacaagacaaattacttcacatttccaggcctgtgtcttgatctctaaatgagattaataataatgcgtactttgaaggactaccgtgagcactaaatgagataattcacataaaggggttatagcccttagcatacagtgagcatttaatgaatattagtgattcttgttatgcattgcatagtaaagagaaccctggatttaccagatccatggacatggattatctgcctggcttcatcccaatcccaatggctgtgtgagtttgggtaattctccacctgtttctgtctctcagcttaaggtatcgcatgcctgatggtcttgaaggaccctttgcaggctgtgcatcaatgaccatcagcagtggtcactgcctttcatatgtgctagctcctggagcattcagtacctgcttagacagcatcggtttggctgagctgagggatcataggagtgctttttatggtgttgaatttctttgaaaatttctttagaactctggagcccaggtgccagggtggagtctttgttctcccactttctagttggctgtccttcagcaagttacttaatttctgggcctcaatttcctcatctgcaaatagggcccacttcataggatgttgtgaggatgaaggagtctgtccatgcaaagtgcttaggacagtgcctggcgtgcagtcagtatccagtcagtttattattgttattgcttttaggccacatacagagaagttacatttaattttggttgaaatgatgttacattattaaagaaaaacattggaacaaacggacaaaatgcaaacaagaaaatgcatgttgagtggctaagcctaaaagacataaatgaccgggcatgatggctcacacctataatccctgcactttggaaggctgaggtaggaggatcacttgagctcaggagttcaagaccagcctggaccacacagtgagaccctgtctacaaaaaattttaaaaaataaaattaactgggcgtggtggcacgcatgcagtggcatggtgatgactcactgcagcctctgcctcctgggctcaggtgatcctccccgcacttcagcctgggtgaactgagaccctgtcttaaaatgaatgaatgagtgaatgacctaaaacatagtgaggcggcaaaagtgttagtcagtgccattattctttttcagagcggctgcacgatgcatatttttcatagaattgtcatcgtatgcaaataattttgcttttttttcttttaattttatgcttctatgtggtcttaataactgctatgactatgacattccatcatgttactgttccataacttatgaaatcattcacctgctgttgaatatcgaaattatttccactttttacaggtcaggcagcagtaagtagcttcattaatatagttttgtgattctgttggatgatgtccttaggataagttcccagtgtaaagttcccaagccaggaacatagaaatagctttaaggatcttgccttgttgttttccaaaagtgatgcattttcatgagtgatgtataaatttaccagttactctcaagcacatcagcactgaatattattttgaaatcgttcctcttgtaaaacttaaactacacttacaaacaccattttgatgaattatctgatggcacgggactcagagaaagggtatgggaagttcaaaagccattatcggtgttaagaatccattttgttataaaatttaatttcccacagtcatttgctttgggcttgactcaatctcattcaagtgctgagtttcatagaaaggagacatgaggctttatttaagcgtacccaattaccatcacaactttttgtcttctgccttccagagagcaatgattattaaatacttgagtttcttcacatgaaagagacagagtgagcccagaagtgttgttaacattgttaatgtaatgcttactgttaggcagcgtgactaatgacccagcaatccctcttcgctgcttctgtagagagctaaccatttccctaactgcatatggatgacaagagcatcaattcaattgttaggaaaatagatacattaaacagtttgctgggagggtagtttgaatcaactagtgtagaacgtcagggcgttggagtgaatagaacggacaaggccattggttcatcagtgaggttagaggccatattgggatgtagtcataaactggttcagggtaggagagaaaggtaaacaaaagattatttaacatgactttggaatcacagacatcttgagctagaagagaagagtaaaaatctcaaattattccctaattttgccaatgaagaaattgaggcttctagaagtgaagtaacttgtctgaagccctgcagctagagtgtggctttgtgtctcctaagttaggatagcaatataacagtgatataataacgcatgtaataatataaaaccatacaacatactgtatatgttatgattttatatttacatgttacagaatattcaatacattgtatatgcaatccattatgtattgtatcatatataacatatgatgcaataatatatgtaacaatgatacaataataacatattgggatacagtattacaataatgccagtggcttcctatttgccaggcatggcactgaaaggtctgtgtatattaggagcttccatttgggagcagttgacatgtaactaaagtgtcctggaaatcggttttttcttaagtgaaagatcagatgttggaaagggaaaccctaagtgtgacagaatttttctcatgagaagtatgggtgtagttttgggtgtgggtaagaaaagggaaggaaacttcattctgtcatcagatacctccaaatttagaacaatatctatccgtagccattggttttcggatatgctttaccctgggaacgtgcgtaaaatacatttccgtgtttggctatttctttcccagctgcatagagggtgtcaccattattttagataatagccatggccagtgcccactttaatcacttttccaatcacttttcactgattgcttctaaggcacttgatttcagatgtcactttttgctgaaatacctggataactgtttcagggggccttgtggactaccgagaagtttgcctccaggggttggtaaacttctaaaagtgccaagtcatgaatattttatgctttgcaggcccaagaagcaaaagtaagactattatgtagatacccataaaacgatttaaagtgaaatcatttaaaaatatgaaaaccattcttcacttgcaggctacgaacaagcagcctcctgtttgactggggttgctcagcgagccttctggcttctccggcacacacacattcaggtctccatctatgcaaatggagacctccttcttcttctcaccactgtaataaggagaaaacagacagtggaaggtttgtagaacctcatgattgactatagaggctttcagcatttttcctttactattaaatgggacactgtactaaaaaaaattctattgtttctatatttgttcatttattgattggatgttcattcatccaacaaatgtttattgaacaggtcctgtgtctccactgttccaggcacgggggatacctaatgaggaaaataagacatctctgccctctggagtttttagtttacatatgaacaagtataatatgtaggcttttggatgacaggtatcatatagaggagccagggaaggggacaggatggacaggggaagagggttgttagttttacatgtgatggaaagggagagtgatcagaaataaggagcagaatcctgtgtgttgcagatgtctgggcaggcgcgctccggaaaaggaagaggtggcgcagaggccctgacctgggaatgtgtgactagggcggaggctggagacccatggcagatgaagccaggccttgagatgactgtaaggacttggaagggagagccagtgggatttactgaggggttgagtatggggtgaaagagagaaagagtagtctaggacgaccccagtggttttctcctgagcatcggaaggttgactttcgaagcaggagagcttcagtggcacagattgtgggggatgattggggctgtgtgggtacagagtgagtttgaggtgcctgtcagagatctacaaggaggtggccattaggccattaaaatctggagtataaaaatctggagttcagaaaagaagtgtaggcttttttgagagttgttgacataaagatggtgtttaaagctatgagactgggtgagataccagcaagtaagtcagagaagagcaggggccaaagcctgagccccagagcactccagcattaggaggtggaggagatgagggagcaccagcagaaacctcgaaagaccttccaggaaggtagggggaaagcaggagactggtgttcagaagccaactgcagaaagtgttcctgaggaggaggcagagagggggcttcggtgacacatgatgctgactgggtcaaatcccttgaggaccaagacttggccttggcattcagtaacatagtggtcactggagaccttgacaagaggtgtcagtggggccaggcgcagtgcctcatgcctgtaatcccagcactttgggaggccgaggcgggcggatcacctaaggtcgggagtttgagaccagcttgaccaacatggagaaaccctgtctttagtaaaaatacaaaattagccaggcatggtggcacatgcctgtaatccctgctattcaggaggctgaggcaggagaatcacttgaacctgggaagcagaggttgcagtgagccaagatcacgccattgcactccagcctgggcaacaagagcaaaactgcacctcagaaaaaaaaaaaaaaaaaaagtgtcagtggagtgttgggtgtgaaagtgtcaaagaatgagcagaggagaattggccacagggagcatgggcgttcttggagttttgctgaaagcgggagtgaagacacaaggtggtagttgttaagggtattgcggtcaagggaaagttttttcataaagggtgaaataatggcaaggttgaatgctgatgggaatgacctggtagagatggaaacatcgctcaagaccaggagaattgccggacgagagagaagtcctgattatcagctgtggtgcattgagtatttacagtccttgctgacaaatcaccccgctatttagggagcttaaataacaactgggcacctagtttacacttctgcagctggcagttcaggctgggctgctgggctcctggtcttgcctagggttcctcaagtgtctacaatcagctgctgggagggcttatccctgggcctccagcaggctagcccagggtccctcccgtagtggggttgctcacctggtcggggaaggggggcagccctgaggccccaggtcagaagccgcacagttacctctactttatttcattggctaaagcaggccacaggccagcccagattcaaggggaagggagagagagacctgccccctccttctacccgcccttctaacaggagagtgcaaagtcatcttgccaagctgtgggtatgaggagcagggaatcgtttggccattactgcaaacaatttgtcacagctgtctgtgagctaagcatgttgctttcaatcatcacaagagttctttggggtaggtagtatgattgtgattttacagatgagaaaaccaggtcactgagcatccagtaacttgctcaagatcatgcagctagtaagtggcagaattgggacctaaactggtctctgacgtcaaagcccctttcttccctattttcccttcctgcaagtgtctgtttacaagggcagactagagggcccctcctccctttgcttgttaggcatgggaataatatttttgtggatgatgattatctcataatcagggtggactgagggaggtgatcatcttgttgtggcttgcatgtttactgtgcggggattggacagctgtatttatgagaatccctttgaggtcacagtggtgtgttattgacacagattcatgtctctgctctcagctggtccctcagtgccctttgacagtctttgcccttgtccttggtcagctgactctcctgtccagatagtcacacatgttccccttcacgccccactttgttccaggcctctgacttcctctgtctgcctttatcctggcccctctctttctggccctgacacaggtacactcagcctctagtccaggttccctctgcccaggtcctcttccctccagaacttgtcatcatcaactgtcttttcaaccaactggacttcaagctttccaagagcagaatccaaaatgtgggaaaatttgaattagcatcagtgaactttgtctctgacactggctgtatagtcttgagcaagtcctgtaccctcaggtgcaagaatctgggaagagtggacactttgagccatctccaaggccattcagggagagtgagatctctttatgtccgcctaggaaacccgtggcctagagctcagttctgttctgttgcagtggctgcagtgtgtcctgggtgtatacctgacagccctgcattttgctgcaagagctgcagccttctctctgccctctcctaattcaagcgtcaaaaccttgttggccccagagctagagccgctgcaagccacttcgctcatttaggaaagcaggaggcaggtcctgtgctgagtctgcaatctcagcaaagacctcagtgaaaatgttttcaagctctctttggatagagggagcagagcagtgagtaattaggttcaatcacccatttcaagtctctgtgaccttgcttacatagggagcccggagctgggcccttcttggagtccctgggttgggatcccagccagctgagtgtgaggaagggagggagcgagaagggatggaggagaagcctgggccagcagagggctgctgtctctgctgcgctttcagcaagctcatctcaggcatgacattcaggatgcagagttgctctttatttttttatgtagtttgctaagagaaaatagccccgctacttatgtatcagtgtaatccaggggaaattacttaatttccgtcagcctcaatttgctcatctgtaaaatgaaggcaactaattacacctgccttagcatatgaggcgtgaatacgagaatgcttgacaatacttggcatagagttagccctcgataaatttcagctgttaatgttattatagcaccttcacatgttgttgtgtttatattgtaaatcgttggttaaagatatttttattgtcatgatagctccatactttcaagatgcgtctttgtagtatttcgtatccatttagtcattcattcactgagtttgtatttatcagacacctacttatggacaaggaactgttgattattatctttctgttcaggttatgatgagctgttcatttcttagtgcttgccactataatattcagagctacagttcgctgagcacctgtttcaatagagttgctcacttgggagatagattctaaagtccgagcataaagagaacatggcacagaggaagaattagccttgaaagatcccttaaatcatctgtaaagtacagtgtacatcggaggtcatcagactttttctataaagaccatatagtaaatattttaagctttgcaggccacctgtggtctctgtcacatatgctgctttattttcctttttaaggaaagccctttaagatgtaaaaaccttttgttagctctgggcccttaaaaaataggtctttgtctacatgagcagactgtggtatgtcttctccaggatggtccggggatccccgcctcctggtattcacactcaggtgtcatcccctccctctctggatcagggctggtcctatgaccagtagaatacagcagaagtcatacaagatgttgtagcttccgccagcctgtctctcttggatcccctgctctggggggagaccagctgtcctgtggtgaggcgaggtcacaggtgagggtctgtggctctggccagcagcccacagggaagggaagcagctcttccagccccagtcaggcctcaggtgactgcagcttcatgagacatcttcctgagccagaactatccagcttgtgtcagccactctgcctttcaggtcattataaaatctgcagcagggaacggggtgcggtgaggagttctaaagaatgcctgcttgcctgcagagttacattgatttttttattaaatgtttgctggttacacttgtcaacaaatctgtttatggagaggatgagatgggaacatgtcattcatgggtgttcttattatcatgcatttcttggagtttccatcattccaaccagagagagaacatttaccattcagcagatggctgcatatggacagttaagtttcctgagggagtgatgcacctcttctgggtgagccagacattgaggtacaccactcagtcctggcagcagcccccactaaggttaggattggcagctaaacgtctagcttgatccaactcgctcctgatgcccctgcttccactgatacccagtgtggcctctgctgtaacacagcagtgcgcttgcaatctggggagagcttttgcttccacactgaatagcttcagatggctttgctctttttcggttgtgccaagaggcccttctacactaaatggctcatccatgggtagctaccattgacctctatcgtgtggcctgctttgggaagacaagccgggtcaattggttctgcctcaggaatttgaaaccggacacagggaagcattctaatcattggcggggatttgagctaaagaatctacagaattggaaccaggcagtccctgtgtgcttccgaattatgagagagtggtaactcagaagaagcacgttcatgcatttatctaatgaacattgattagacatgtgctgcatgccaggcattgttttagccacttgggttacagatatcctcatgaaacctatattgctagtaggtgaaaatacacaatagacagtcaacattatccgttagtgagttgcatgtaaagaaagtgcgtgaacaatgagaacacatggacacaggaaggggaacatcacacacgggggcctgttgtgggtggggggagggggaagggatagcattaggagatatacctaatgttaaatgacgagttaatgggtgcagcacaccaacatggcacatgtatacaaatgtaactaacctgcacgttgtgcacatgtaccctaaaacttaaagtataaaaaaaaaaaaaaaagaaagtgtgaaggtgatgagtgctgtaggaaggaggataagggggcatcaggaattccagggatcatggggtcaggttgcagagctaaagagagtgtccggggtggcctcattgaaaggtgatatctgcgtccagtcttgagaaggtgaagcagttggccaagcagataaacctggggcacaggcatgccaggcagggggacctggtaggtattgaaggaacagcacgaatctagtgtgactgcagcagagtgagcgagagcgtgccagccttgggttcattgcaagattacatttctgtttcattttaacaaacctttgagcacctactctgtgtcaagtagtatttggcacaaagcttttcaaacctgggttccccatctgaaccatacaacacagaactctgtgactatttgttcagctcttcagctcttccaggagtgtgacacagctgatgctttctggatgcttgggagagaagttcattcagtacatctaatgcatgccctagggtattaggcctcattctctgctggaaccctgactgaaaaaggcagaattcctctgcccccagcccttgccctgtaattacagactagtaaatactatgaaagatcagagctaggatctgaagggtaagtcagagtaaagtaggtgaaatgtgaggtgggcccttggggagggagaggatactgtctaggtgagaaaacagtgggcagagacctgaggcagaggtgggagagggggtgagatggattttgtagggcctgtcacagccttgagtttaagaacacttaaactcagtctcaagctaaatagccattaagtgtttggagagagagagagagagagaaactgattgagaggatacgagatttgtgctttgaaaaattgatgagattgccctggctgcagtgggagaaagccttggaatggcaagaatggaattcttaagctgccttgtatttgcaggcagataagggtggtggcagtgggacagattccctggatataatggaaactccaagaggacttgggaatggatgggatctggggtttggaaaggtattgtcaaaagacaacattacaacaatgtaaagacctgaattggcttttacttgtgattccagaattgagaaacacttgaatagaattgagtgttctgatgggccaagcagaggaggttggttttatagaaagaaaaggactgaggaaagcagaaacagaaaataaaaagcagattggttgtttcagagttacttttcttataaaggttaaagcagaggggactttcttatcatgccagctacaactggcctgtttggggatttggctattctctctctctcctgatttctcggaaggtcagataaaaatcttattttggcttagtggtatggaacttgagcgtgagtgacaccattttggtttggtctattgggcatattgcaggagctcagttcaaaccaatgacctcctataaatttaatttaacaatttctccctttttgtcatgctctcacctaggagacagtgtgaccaaaacttagggcatcagcactactccgtcatcattattttggggtttaaatcttaacacgtcattcatgggtgtcctcattatcatgcatttcttggagtttccattattccagccagagagagaacatttaccattcagcagatggctgcatatgcacatttaagacttttttgagaggatacagtgcaccagggagactactgttgtggctaatgactatgaggatgataataccaagagtttggagtatgccccttagccagggtccccatgaaccaaaccaactgaaatcatttagatcaaataatgagccagatggggaatctacctgttttagccaagcagcctgtttgttcggtttatccatgtgcaacaagaagcattagcaactgtgcagattatttcctgttcggctagaaggtggcatttctgttacctaccatcccatgactaggtttggcatgacagatccgttttttcatcaagtctctgtagaagctactgattgtgcaattccggcaatgtagcattatcctgccaagtgaaaaaggtaggcataagcaaggaaaaatcaagaggagtcagagcctcattatgataaagaatcttgttctgatgtcttgggaaaagctgtccacagcatgaagttgtcagcttgtcctggtttgcagtttgactgcctgtgattataacgtccggtgtttgggtgaactctctgtggcccacatatcaggtatgagacctgtccctcataatatacatggagttgtcaagctccagcttgtagggcttctgggacagagcagttcttgtgtgtatttggagagttgtagccagatgtttccaaataggaaagtagaagaattctggatccgttccagcctacaaatagtaaaaactcaaaaacaacgaacagggctacaatctaataacaggtgtactatagtttttcttctgaaacatagtttttctctctacagtcaccctcatttctactaaagataaagcgaggtgaatttttttgcaaaatgagcttagtctcgtcaaacttggcctgattatttacacaactgcagtaatgctagtgattgatcacaaagtttgctttgctggaactttggataagaaatctcagattggacttttaaaggactctcaaagctaggaagccaaactgatatttccaactatattctgttatgagagcagactcatattgaacttaatggaaataactatattagcacaaagataagaagagtcacaaataatttccgaattctggagatattaggtagggagaaaacataaatatttcgtttttgttcataagagtataactttaccaaattactgaaagctaatataaggaaaaaggtgttttttttaatctgagaaataaaacaccagcaatatgtcaaattaaaaaccataaaacccacaattgttatttatcattttattctgtctcatgtaattaatttttgttctgcttgatcttggtcagtagtttcacaagcccatcagtttctttattagagttctggaaatgtttagccagtccaatggtatgatcttaaagttattagagacctcttcttgtcaaagtcctttccatcctttccatgaatctccttgaaaacacaacattttaggattatagttgcttgcaaaaagcattgagaaaagcatcagaataaagcaaattaactgtggataacaggacttaaagcgaccatgattagagatctgatgagggttcattataataatgattcagttgacaaggaaatttggctgtttctgtggcatacaacaagttaacatgataaccaaaattatgactgacagcatatcagatgatcagataagcctaattggagtaatgtttctctttttcacggtgagagactcatcctttgatgttttctgggggcccaactgagaaacctcaaagtgaatttgaggtcagagagacttgatctaaaattgattttgagaagtttgtcaaaaatatcaacaggtttaaaacaattaaaatagtatcacatgtcattgtggaaataatagttgttcatttaaccagtgataagaaaaagacttcagaaggcaaatacagtaagttacatagttgtcagcaaaaatttagctcttttaatattgagaagactcacatttcttaagtaatcaaaggcctaataaaagaaaatgcaaagcgcaagaaattgtcttgataaaacacaaaatctttatttcctaggccaattatctagaaagaaagaaaaacctttcactatttctcattaagagtaaatcaatactccaagaaagcattgagacaagcatcagaacaaagcaattaactgtagataacaagacttaaaatgaccttgataacctcgtgttgagagaaccaaattctattttgcattagcatctttttattttatttatttatttttttgagacagggtctcactttgtcacctacactggagtgcagtggcacaatctcggctcactgtaccttccacctcccagggtcccacctctgccttctgagtagctgggacagcaggtgtatgccaccatgcctgactaattttgtatcctttttttggtagagatgaggttttgccatgttgcccaggctgttctccacatcctaggctatatgcgatctgccctccttggcctcccaaagtgctggggttacagacattagccaccatgcctgacccatcagtgtacttttgatattaatgctcaatttttagaaaaaaaaggtttagaaaaaaattggacattataaataatttccttttaattttagctcgatcaaacataaaattcctttcacaagattcatcttccacaaaccttttaccattttctgatcgattctgttttgtcctctaatgtttctctttctcgttttggaagaaccgtcactctactgtagaaagaaaaaattactttctttttcccttaacaaagtctcattctttataacttcctatttagaaagtatcttatttccctcacatacagagttatttccttctagttttaatggtcatccattaattagactttttaactcttggtaaccttaatttctagtgaaaactagggagtgagcaaatttaaactgttttatatcagcactttgtacatgagcaccatttcttaatttttaggaacatgtgccctaatacagtttttttcatgtttattaacagactcacaaggcccgcatgtatttaatttatgccatataaaaacaagatgccagaatacatatactttacatttatattcagatattaatgtttcagtattttaacttatttagaaacaactcagacatttcataactattacttaacataacttgactttaagatttcaagttactggccaagcgcggtggctcgcgcctgtaatcctagcactttgggaggccgaggcggtcggattgcctgagctcaggagttggagaccagcctggacaacacagtgaaaccccgtctctactaaaatacaaaaattagctgggcatggcagtgggcacctgtagtcccagctactcgggaggctgaggcaagagaagcgcttgaacccaggaggcagaggttgcagtgggccgaggtcacagcactgcacttcagcctgggcaacagagcaagactccgtctctggaaaaaaaaaaaaaattcaagttactgaaaaggatttttgaaactatgatttaatccgtctataaacctttatcccctttacattcacctaatttagtcatgcttaatatttatgcttgaaatgcttcttaaaactaatcagtgaaggagttcaggaaatgccattccagaatatgtcgcattagtatattgatcacttccagctgcatgtacttgaaatacaacaaatgcagggagaggcattctctgaactcgtacctgcccaaagacagattctcagaagaactcagctgtcatcagtccctcctctgccccatcatcttacattattttatttttgttgacaaacaagacaggtataaaaaaaatcacagaatcaaagaaacagaagttaaatatgattctttatatttcaaaccattaatctttccattttctgttccatcaccctaagcagttgttagccagacaaccctaaatctgtccttccaaaaagatgactcttggatgaaacgagtttaaaaattgacatctcaaaggcataaaattaaacaccattatttgtcaagacaaagaaaggggtgaagtgggaattccagttaagacacagtggtccaaggtgaagcttattgtttccttgttttttatttttattttgagacgaagtttcgttctatggcccaggctggagtgcagtggcacgatcttggctcactgcaacctccacctcccgggttcgagtgattctcctgcctcagccttccgagtagctgggattacaccacacccagctaattttttgtatttttggtagagacagaatttcgccatgttgcccaggctggtcacgaactcctggcctcccaaagtgttgggattacaggggtgagccaccacacccagccacaggcttgttatttagatttgagtcttgccttcttcattgtaatagtttctagtgattcagggtgcagagaggcagatcccttacaaaatggagatttcctttatagatgtaaatttcttacagagtttcaaagtagccagctgagtgccagaaatgtaggcccttgtacgttttatttagcagtataaagtgagtcaaggatgccaccaggttcctggcttatgttaatgggtagttaacatccactgagataagaaatacaggacacttgttgctgtttatttggtttacgtataaacagtgaattgtggttcttttattcaacaccagagtgtaaaccattgactggaggtgttcacagactcggaataattgacttcagttcttcctgaagttcttaacttgtgggatttgggggcttttaaagggagtgacttggagggacaattctccaccttgagagaggtctccctttcatctggcacggcatctccagcatatctcctctaagcacctctgcccaggcaggtaactgtgcacgaactaaccttggaaaggtcaagagacctggctgtggctcattttcctttcttttcttgggtacttgggctcctaatgaaaatgcttctcattcagaggttccgggaagcctccatccatgagcaactcacatgatttacagaagaattgctatgctgtgtatcttcacgtgggtaacacacttgttcctcacagcccatagggttttgttattaaactattgagacccatgtgatggtggagtatcaagattgacaggttaatttcccatttatatagaacattatatgaaaattgatttttttaaggcatgggggtggaggatcctgggatgtgtggcgtggtgagagagaagattaagcatttagtgttttcagctacatttaaacttgtcctccttggcaccaacctaggggctgctctgagttctaaaggaatcacaggaggctggttgtacaagtggctgcattgcctccatgcgtttcctttgcttcttcccattaaaagccaaggaccaccttactcttgaggcattttaaacaatgaaatctaaggaaaacatgctcagttgagaacagacttttggggaggagtgaatgggaattctatgcaaggccgggtgcgatggctcacgcctgtaatctcagtactgtgggaggctgaggcaggcggatcacttgaggccaggagtttgagaccagcctggccaagatggtgaaaccccgtctctactaaaaatacaaaaaaaaattatccaggggtggtggtgcacgcttgtagtcccagctacttgggaggctgaggcaggagatttgcttgaacctggaaagtggaggttacagtgagctgagatcgtgccgctgcattcaagcggggaggacagggcaagactctgtttttaaaaataaaacaaaagaacaaaaaaactgtatgcaagttatttgattggccactcagaaagattactgattgattatgaattgaatctgttgtccaggcttgcattctcaaattttccagtattgtcaagaagccagaggctggtgttgatttgatttaacataacatttgacttaacataacggatcctattggtaattttatttcattatcttcgcgtggttttgaacctcaacacctcagcagtcaacttattttagatcttccatttcatcagaacgctatcatagttcaactaaataattatagtatgacgatgtagttacatttaagtactgtgaatgtaaaacatttggggctgagaaaaacatacactgaaacccggtttcttacttcatcagcagatgttaatgaggactgtctaagtctctggcactgtgctgggcactgagcaatatagaggctttgcctgccttttccaggaggcatcctctcactgccaggtggaaaacaaaggcagtggatgtaacctacaacacagagaggtgaatgctatgcagagagctctggcctcattaccccgtctaggaggtcaaggaagtctgtgggagaaaaaaattattcaaacagagagggaacccagcatcttgtggacagcctggatggtgactttgtgttgatttcaggccaattgggcagctccttgtgtggctgcccagttgtgtagtggagctgcattccatacaggtggggggttgggtctgaaaagtccacacagcaccaattacccatagtcaaaatcacacagagaatccttgtcggagacccacagagccagttgtcttcagcattggaacagaatgctgtttcttaaaagcagggatggcaaatgggccaaatccagttggcggtctgtttttataaataaagttttgttggaacacagccatacccatttagttacatattgttggtgctgctttcttaccaaagtggcagagttgaatatttgcaacagattgtatggcccacgaagtccattgtttcgtatgttgcccttcaaggaaagtttgctgccctctgctttggagcaaatgaaggaattcgttttatattcaggtactacgttgtaaaaagaaaattgttacctttaaacaccagaatcgtatcagtgaggtgagatattcacaccccagaacgcatgaaggaactgaagaagcagtcacctcgcctctccatctgaccctcacctggcatcatatgctctgactaaattggagagtgatttgcctaaaatgtgtctccttcctccttgccctgccctgcctctctgtttgtccaaatgcacgtagctgaattcgcctgagttttctccatactccactatatgcccctctgccaagaccagctaggtcggggagaccctaacccagcggcgctagaggaattaaagacacacacacagaaatatagaggtgtgaagtgggaaatcaggggtctcacagccttcagagctgagagccctgaacagagatttacccacgtgtttattaacagcaagccagtcattagcattgtttccgtagatattaaattaactaaaagtatcccttatgggaaacgaagggatgggccaaattaaaggaataggttgggctagttaactgcagcaggagcatgtccttatggcacagatcgctcatgttattgtttgtggcttaagaatgcctttaagctgttttccgccctgggtgggccccgtgttccttgccctcattcccgtgaacccacaaccttccagcgtgggcattatggccatcatgaaaatgtcccagtgctgcagagattgtttatggccagttttggggccagtttatggccagattttggggggcctgctcccaacatgtccgccttctttgatttgcaaatccataaaagcaagggcagctttgtcgcggtgagctacttctcgcaggagtcaggatccacatctgcagactgtacaaagacaacacagattaaaagcacaatcatcattgaaatcacagagcttccaagtgtttttatccattttaatgggttactagataaatatgtccagtaagtataattgttctctgtgtcagcccttgttgaaggaatactcacggcagtggtgataacctctatcatagctaccattaaattacttgttgtgactggttgtcccgctttcctcaggttttcttccaccatctgtgacagcttcttgatctgtccccaggtgggtggctgtgttcgacgggtgttgctcatgacagttggggtcctcctcagcatcagtctcgacatggctgcaactgaggggtccttgggatcctcccggaatctcttcctcggcatctggctcatgataaggtttcaggtgtcttgatggtatccaaatcggctgttgattttgggctggagaaatacaagcataacctctactccaagttattattttacctatttcccaactttttgttatcggatctctccactaaatcagttgttctgcttctgtctttgcagctgttctgtagatgctgttcagctgctgataacatctggcctttgggcaggctcaaaaaatttaaagttaataatgctagattcagttgtatctgcggtgttccataatctctatttccccctttctgcttttgcaactgctgttttagggaaagattcattctttccactatggcttgtccttgagaattgtatgggatactagtaatatctttaatattccacatagagaaaaatgtagctagagcttggctaggatagcctggggcattattgttttaatagaagctggaatgcccatcaccgcaaaacactgcaaaaggtgacgtttaacacaggcagaagactctcctgattggcatgtagcccagacaaagtgagaaaaggtgtccacacatacatgtacataagctagtctcccaaacaagggaacatgtgtgacatccatttgccaaagacagttaggttccagtcctcgagggttaactcctcctgtaaaagatgaagaatgtaccatttggcaagttgggcatcactggacaatagctttagcttctttccaggtaatgctgtatctgcgtttgagaccagaggcactaacatgggttaaattgtgaaagtgtctagcattagatatttcattagcaactaggcgatcggccatttgattcccttcagtcaaaggtcctggaagaagtgtacgagccctaatgtgagtgatgtaaaaagggtgccttctacttctaactgctgtttgcagttgggtagataaagtcatcagttgttcatctgtatgaaatcataactgagcattttcaattaactgtgtggaatgaaccatgtatgaagaatcagaaaccacattaataggcatatcaaaagcagtcaatacctcaattacagctacaagctccgctttttgagctgaaatatagggcatctggaaatctttactttttgatccagaataaagctttaccattactagtcccatctgtaaaacaatgaaaacgcttagcaggctgcaggttgtttactgcaggaattgtaaatgcaaaccgttcacagtcttgctcagccaaagggatagtgaagaaacagtcttttaaatctatggctattaaaggccaattttttggaattataacaggagaaggcaatcctggctgtaatgctcccataggttgtataactgaattgatggctcttaagtcagttaacattctccatttacctgatttcttcttaattacgagaactagagaattccaaggggaaaatgttggaggaagtatgtgcccattttctagttgttcagtaactaatttctctaaagcctccagtttctctttacttagcggccattgttctatccaaattggcttatctgtgaaccattttaaagatataggttccggaggcttaacaatggccaccatcaaaaattatttcctaatctttggcggaactttgtttttccacttgaagcagttctttcaaaccttgcaaatttttttctagtcccataccagggacatgccccaattcatgcattgtatgttgactttgaggactatataattgttctggaattagaacttgtgctccccattgttgtaataaatctctcccccataaatttataggtacagaagttataattggttgaatagccccaggtcgtccatcgggcccttcacaatgcaaaatataactactttgatatatttcagcggctttaccaactccaaatatgttacattgagcgggttgaattggcctcacggacggccagtgctgtagagaaatgattgaaatgtccactcctgtatctaccaaacctttaaatttgtttccctgaatagttatttcacaggtaggatgtttatcagtaatttgacttacccaataagctgctttgccttgtttatttgtgcttccaaatcctccttttcatttaatttcacttttccccattcccccatacggcacaatcaggagctgtgctatgcactctcctggctctgctgtccagggaacagaagtagttacaacaatttgaatttccgcattgtaatctgaatcaatgactcctgtatgtattcgcaccccttttaaacttaaaactagaccttcctagaagtaatcatattgtccccactggcaagggtccacagactcctgttggaaccttttgcggaggttccccaggcagaaggctcacagcttttgtgcagcataaatctactgacagacattgtacggaggtgatggaatggcctgagctggaaatgccccggtttagaacggggcccgggacgggcccctcatggcgtttcccgaaatcgggttcccttctatatcaaacttagagtgacactgattagcccaatgttttccttttttacattttggacatatttcaggctcagcagttttcttttttcccctatctggcagcctgactcgcttattttttctacattcttttttagtatggccatgcttcccacagttaaaacaagctgcaggaaatggagtatttcctttatccactctcagtcttgccattgcctgtgctagcagagtagctttatgcagattacttccgataccattacaggccttgataatcaactaaatgcgctttccctctgataggtcgcagagcagcctggcagtcgggattagcattgtcgaaagctaataactgcaacactatatcctgagcagccgaatctgcagtcatctttttaagagactcccgtaaccgagctataaaatcaacgtatggttctttggatccctgtttttgtagcactaaaggaagggtattgttctccacttgaagtgattttttccccagctctaatgcacactcctctaagctgttctatggcatcatccggcatgatgagttgtgcatctaaagcagcccagccgccgacccccaaaagctggtgcgcagttatattaattcgaggttgggcctgggcattgcgagcagcctgaatggaagcttcatctgcccaccaagttttaaattgtaagaactgagcaggagttagacaagctcgagtaagagcatcccagtcagtaggaatcatccgactggaaacagcaacattctttaacagtcccattacaaaaggagaacctggtccatactgatttatagcttgtttaaattctttgagtaatttaaaatgaaaaggctcaaatgtagctataatatttccctgttgatctgggggtgtattctaacagggaactgccaagcctctaaatcactccctcgtctagcttgctgaattcctgcctgaatagaattaagagtggtcgctcgaggtgctgcttgaacagtcactggggcaactaattttcgcccagtgtcctccggaaaagaaagatctggaggatcattttcttcaaaataataatgagggggtgcagaggggtagggatgaacctctccctcctttgctgctttagctttagctggtaaataaacatgctctgtaacctcttttgttacctagctatactctccttcctcctcatcatcggtgtgaaaaagttccaaggtgggacgaaccacacccccacacttgtcctattgttaccctgatgcttctgagctccccttcttactcaccagggggattgctttgagagtactcgggtgtcctccagctagttccgcattctccagccatcactctggcgacccctccacctggattcgagcccccacgatggacgctacttgccgagaccagctcggtccgcgagaccctaacccagaggcgctagaggaattaaagacacacacacagaaatatagaggtgtgaagtgggaaatcaggggtctcacagtcttcagagctgagagccctgaacagagatttacccacgtgtttattaacagcaagccagtcattagcattgtttctatagatactaaattagctaaaggtatcccttatgggaaacaaagggatgggccaaattaaaggaataggttgggctagttaactgcagcaggagcatgtccttaaggcacagatctctcatgctattgttcgtggcttaagaatgcctttagtggttttctgccctgggtgggccaggtgttccttgccctcattcccgtaaacccacaaccttccagcgtgggcattatggccatcatgaacatgtcacagtgctgcagagattccgtttatggccagttttggggccaatttatggccagattttggggggcctgctcccaacactcctctcctccttcaattgcagtggacaggctgatgaaaaaagagcagagccaggcttaataatgtggatgaggcacttctgccaatggaaagctaaaatgatgtcgtgattcagtagaaaaaagtggtaagacaatgagttgtcattgtgacacacagttaagcatattgaaccccaatataactaactctctacactggattcacattggaactgactgtgcagtctcaagaagacattgtccttattgtccatcagtgtgcactgttaatcaaaatttggggatgggagttttagttgcgtttagttataaatgtgctttgattttatagttgtaaaggagctagatgcgtatggcagacagactttaaggtgacccctaggattcttgcctcctggagttgacgcctttgtctcattgtctcacctggagttggatgtggcctgtgactcgcttcccacttctaactcctcttgccagctgactccctctggggccattcttcctggctagctttgaggaagaggcccctgtggcagggagctgaaggtggcctcctgcctatatccaacaagaagctggggaccttagtcctacagctccaaggaaatcagttcttttgcccacaccccgagtgggcaacttgaatgaagacccttccctggcggagtccccgctgcgtagtaccctcattgcagcctttcagggacccagctaaactgtgcgtggacccggacccctgacccacagaagctggtagaggataaatgtgtgttggaagccactaagtttgtgtacttcattatgcggcaatacgaaacatttcaggacttacacaagttgttactggtacttatttaatgttataaaaatctgagccaagtcagatcactttaggatgggaacatctgaatcacagccttggtgagcttctaatccaccgttccctttttcttcccatcaggcaaaggcaaaagtggctcctgaggtcctttttgtagcactgacaggtttccttggtcatagtggaagagaggggcatcccacatcatttggcccagtgttcttttatggaaggacacatggaggacaggggctggccccttaggcttgtcttccctgaggtcagctgcagcttccaaggaggtagcatcttgagacatttataatctatcctttgtacagctgcttgtggccccccccttgtcacataatgagttcgcagttgggatttcctcgtgtgagtttccagcaccctagggccatatttgtcctaggattctcctcatcatttccccccacccccagtcactgctgcctcttagcctttgcttctccgggctgaggaattcctgcatttttaatctgtcctgctcctgctggcctgttttgtctagctactgcccttcaaaaccatatccagtttcactcataaaaagcagggggaaatggtcaaaccaaaccctccagcctcccctgtgtagtcctggctcttgtttgattgttggttctctgaagaaaggtgctctgaggaggaagagggctgcctgtgcccccggcaccccccatcatggaggctggcctcctggtgtgttgtttgattgggtgtccttttgcacccctgaggtcctgctagtacctgcagtgctgacagtccctgtgggcacgggtgtgtgtcaggccttagtcatcagcacttaaccgctctgagctgcaaacattgggcctcagagctcagtgttgatgtgatcaccgtctcacttctgccaaaaatagatggggaggaacatatttctgttaagctcttgagggttacagctggattaagttagagctcctgaaaacagcacactggcttatactagtggtttagattctctaagaaatgtgtattgatataaagttatcagactattgattttttgtagagtgaaaatattaaattgttatttgaagaacatcatagatcttgtaaaagcaaagttgaagaccagattcaaagttactttacattcttcttgaaattccttctagaatgttgtgctaggaaaagtccctcttctgttgagtttatttactttcttttaatggacaaaacctatcttatttacctttttacctttgccactaggaaacttagaaccaaacgaatacaactcagttgcagtaaatcttgagttctaagcttctgactctgtttgcttttaaagtgtctcatttgctgtgtgcttagtgttttctaaataaatacctaccattaggggaggaattgctttgtaactttgcacattagctccgtggtttgcgttgacctcgattctaagcagaaacagctgtgagtatgttctattaattattaggtgagttgttttaactagtgcagacaagagcttgttgacctgtgctctgggtgagaactctgatttctgcttctactcaaaagggtcaaatcccatgatgtagttttgacttaggagaatttagttctggcctggagtgaatctttgtgggattgatgcagaccaagactcgtgttaaggccgagctctgcagcagctggccgcttgtttgtcttctgagcctgtttcatttgccttccctggtctgcttgagcagaggagagaggaagaaaagctgttggcagatgtttttagtaagacccttaagcgtaagggaggaagctaattttagtcctgtttttaatattatggtagtttggttgcgtctttcctcttagggtagagcattttagcttttgtttttgcttttgcatttcctgtgtatatatcctgaagcaaaatggactgctaaaaatgtcacttggtgtttgttattttgtgcctagaataacattcaagacccgtgagcactgtgagtcactaaaatagttttaggagaaaggaatgttgtctgtgttactcttttctatatttccttctagaaattttccagttgattcctgtgcttatgttaattggacatccataatctctttcttttatcatcagcaatacagtaacattgtatttgttagcacattgcatctctacttgcatgcagagctctttaattttaaaagtacagtaagttttggaagaagatcatggctaaagaggcaagttgctggaaaatacagttgtgctgcttactcagtgaacaaccagccaacaagctgcgtgcacgtttattgtgatgagaacttaaacacaaagcagacgtgtaagttcccctggtgtccccagttcctagcacatagtagaaactttgtaaatatttgtttggggtaaatgaagtcagtagcactacagataggaggccgtaaggaaggatggtttctaaaacaataaaaagggacatcagctaggccagtggtcttccaacttactgtgtatcagaatcacctggagagcttgttaaaacagattgctgggcctacccccagagtgtctgcttctgtaggtgtggcatgggcccaagaatttgcatttctaagaagtctcttggtgaagctgccgtcgttgttggttcaggaccacactttgagaaccgctgactaggctaatgcctgtggatgagaaaagaggcttagagaaattatgttttgcctaattgacaaaaccaattagtggctgaaacaacacagaaggccaggtttgtcctctcacttcctaacttgaggacagagaaatatattctgatgtccctaactggcagtctgctatggtagtgaccacatgcccatttctttcttgggatttcgtcccagcctgacaaccttggaacagaacaagaggacaggaggtgtcgttccaggtatgtgttagctgcaccagccactctttgtggcatctgctacccatcaaaggacgtggttgggctgggagccaagttaagttttctcattgtttggcagttgtgtccccagattttcttgcccatcttggagatcttagcacagccggggtgcttggggctcagctgccttgaaggggactcagtcccccacacaggtgattcccatgtcccatggtgggcactgagattggggtgaggggagcacacttgagggacccttcacttcctcacagcccttgcccctttcctcagggtgcgctgggaagaacccccagcggctgcccatgcccacctcagaagctgttcagtttgggcagaaggaggttattgtggccaccttctgtccacggttttcttttacatcctttccattgcactgttggtgcccacctccccattctaaaagacatggccactggctccacttaaggaaggcactttattgtcatgattaagactgtgaggccagcctataatcccagcactttgagaggccaaggtggaaggatcacttgagcccaggagttcaaggctgtagtgagctacgaccatgccactacactccagcctgggccacagggcgagattaaaaaaaaaaaaaagactgagtttttgtcaaactgagcagttcgagttcaggctgtttcccaatcatgctgtgactttgcacctagttcttttctctgagctttagtttcttcatctgcaaaatggcaattaatgtctgcctgtcagggctggcgtatagtaagtgctcagtaaattacaggctatcttttgaggagcaagaagtagactagctcctgactaacccttgccttaaattcctcttctctaccttcattccctgggggctttcctggtacaggggcaggataatggtgtgtgcttactttggattttgccttgtggcaatttgctgtaagacatggttggggaattcatttttatctagacatcaggaccaccagtacattggtaattcgtctcttagtggaaggtggcttgtgggtgtttggcttctcagcctgttggggaccatttttagatttctgaattaatcctttctcatggccggtgaagaaaaaaacacatggtgaaccctgtggacggcacgtcccggcacccgcaggaagctgccgggctccctgctcccgcagagccctcctccacagcctcgcccagcccctggctcttgccctccctgagtcaggtcacctgttcagctgaccctgctgggctggggccttccagatgtgctcatccctctgctgggagcattttcccctcggtccgtgcctcatccccacgagaaatacagcgcaaatccagccaagtgcagcaaatctagccaagtgcagcaaatctcaccagcttctttttaagccagtttcctcttggtggcaagcacagttgctaccaccccccaccaccctctgtggaaagggctatgacgctcgccttctctctgctccctccctcccagctgctcctccagaaccccccagtgtccctgcacatcccaggagtctgcttctggggaaccggaccaaggtttaagcattcaccttggggaggccacccccacccctctctccagacttggttaggggtctttggcctcacttgtgtagcacttgtcccctgacctcggtagcgatgcttcaggtctgccctccccgcgcctccacagggtttcttgttctctgaggagtaggggacaggacagaggcttttcctcagcaggcagccagctcagattggactttccttctagggatccctcttcaggttgggttggtgggaaggccgtctgaactggagcaggtgggctgtgtcagggaggcggtcaccggactggactctagccagcggttcccacctccacgcgcccaccgcccaagcagccagagctccagccctagccgcccaaaacaatgcagggcaacggttttctcctgagccaagtgtggagacctagatttccttgcacctgagggagagggaccacagtggtggcttctcacgccttggggaaccggaccagggcctgttcataacacagagatctgagctccttctcaagtcaggctgactgctttgggtaagagggcagaattttaaagcaaaaccgtgctctgcagggcgcctatttcagcattttcagactggtcttaacgtagttggttcattgccctcagaaatgaatgttgaaagcggtaagccccatttgaagcacccccgattttaacaagcttcaggacacatagttctgtgctaatatttttgttttgatgaaaaatttaaaaacactgctctcaacccccaccacaaagaacacgaaaatattattataaagaaactagatatatcccaatccctgctctgcagtggtggttcaatttgtaaagcaaaagttagaaccaaaaatgctttcaaaggtggcttcgaacaatgttcataactctctgctcgcatcattctgctttttacagagtttagagacccatttatagattcagtccacggattgtcatgcatttgcaaaaacgtctactagctctccgagttccatatttttattatcaagggacccttagatctgaggacatggggactggcagacaccagctgcagaacggaaccgtcttttaggaaacagaggccacgatgagtacatgatgggccccatctacctagtggaaaatgaagcggcatgtttttcttcacggtcactggtggctcttggcaatttctgactcagcaccattggactttctcctggcccctcctttcctctctgttgggtggggcggccgggggggtgcttttgtagccctccacagatggagttgataggaatgtcctgctttctaaccatctgcagaggacctgtgctttgggtcacagggtcctcagcaaattcctttcccttccagttgatttacagttggttccaattggtttacctgtttagaaaattctaagtccatcttaaatgtaaaaggtggttatcatcttagaatgtgctcaaagaactttaaagataactgctttccactgaggacacagttcatctacaggacagggtcagcagtggagttgggaccccaacctctagcttttgggcctgctcctagcaggccaggtggcatggtggcttttcatccagccctgatttgggacacactgatgtttcagcccctccctcttaggaattctgatttgaaaatcactgtatctactctgtattcctatgagagagactaaaagattttgttcagatttgctttcttctgattgcaaataggaacatgtatggtttttttgggtgcactttttcagaccagacgccaggtcattctgacccaccccactcctctcctgagaatcactgacttagtgcagttatttgagggcaaaaagcactttttttcccagcacaaagtaggtgctaaacaaagtctacagccaaatataaacaagcaagccctgaagcagaaggaagagcagggctcagtggtggctttggccccctggttcttatgtctgtcactccacacacgcagtagggcttcaggagatactggctgactggtgctctgagccttttaccagaagagcctgattcagctaaatttccttggtaggggtgactgcttagttggaatttggtggctggaactggtggtcaccccctcttaccctacacgggccttttccaggttcagcatttacagatttgtttcccaaccaggaggggcttatcctaaggaatgttctgatctgagatgagattagaacttcccctgctgtcgaagtcaaagggtcccatctgcctgtcacttcccatgtgccctgggctgtgctgggctagtcatcagcccctccccgtctttggcccaagatgtggaaaatcttaatagctcaaccggttccctcagacctttgtcttctgaaacagtgcttctcacactccagcactgcagggccacctgttgaagcccagtgtcctgggtcccttccccagagaccccagttcatcagattcttaggtttgcaccagggctaaagagctggcatccagaccccctcccatgtgacactgatgccgtcatctgatgcccagtcccttttcagctgaacgaaggatgaagacacaatgttgtcctaaaattgattcagtgaaatagcaagtagtgaaaaagtaaaatagaatttaaatctttagatttttgacatattttgtgtacttggttgtaatataaaatacgtttcttaccggggtcaaaaagcttattagcctctgccttagctacttctccctctctgaaatgcccacctgtgcctttgcacctgtgcttggtccttagttccaggctcaggaggggaagctaaccagtgtcttggcaacttttggctatgggctaggtttgcggtcttcaccaccatacatgacccctaacctacagcagcacctattggcccagtgagggggtttctccactccacactccagggagaagggtcttcacatgtttcaagttggttgtgattaagtttcgtgaaacgatattagccttaatacatgcatggcctctgagattttctgtttcatgttttcatctatgacattgattttgggaagtgctaaatgggttggttgtgcatcgtaaacatcaacattgggagtaatccacaaatccacccctcaagtggccaggaccagttcccacaactctccagggcacctgttctcccccagctcaactgccctgcactttccacagccagatcctgcaccgtctgccagtctcggttccagggcctccattcatgaacttttcctgcatctctcacaaagtgacccccacatgtcctcagcatttgactcacctcacagtgtgccatagccctgggttggaggcttgactttcttgtcagcttatagaccacctgagtgcagagcctgcattccagtgcccccagaacctctgtggcagcaaaggccccacgttgttgggctggttggaggcgctcagccacattgcaaccccagttttgtgggcgggcccagaactgggacttggtttttaactttgtttcaaggggaaggtgtgttctgattccaacaactgacttggaaaagaccgatctctgctttgcctctccaccgtgtggcccgtgcctcctccctggcgggctgagatgtaggccttcagacagacggcaggaggctgcctcctgtggaggatttgggcctttaaaatagaacttcaattccaggagacttagaggatacagctgctgagggagagcaatgaaaaatgagattccctcttgaaaaacgatcactatttcctgctctgaggattctagagtaaagcaactgagtttttgaagttgggttgcccctggtttttcctaggggcattccccggacagtgtggggtttagagagtgttaaatgagagaggtaatttggagggagttagaggaatgctatttggctgagttcaagatccagggaagggggatggctgtcttttcaaaacacttggttgaggagcctctttaatcagtatggcgagttttgtaactgatcacagactgctaaggcataaaggcagtgagaaagggaggactttctgacttaggaagatccccttctccgctttcttgccaaatgttggcaattccaggcatcactgaaatatatgttcttccccaacccattatttttggggttgtttaaaaatagtgtcttggttgcacccataatcccacctcccaagtcgagagagccagtgtataactttggcctcttccttgaggccgggagactgtcccgaggttttgcgctgagagtatttttagcccaggtgctagcacagccgggaggtctttgatgtgcgtctgctatgaaccagccatcttggtcctgggcttttccagaagggtgtaattcacttttacaagcagtcctggcctggaagtcttttcttctcctcttacagtgacttactcccctggtgatcaaggttgtgaacacacttaataaacagcttatttgctagtctttggcttcaaaagggggaagaggagcctacaccaagattgtggcatctgcgtcagaagcgagggtggggacaggatggtggtgatcctagccaagcccagtgtcccacgctgagtgggtgctgacttaagtggaacactgacccagaggaaataagaaaagtcctctagggccaagagcagacgtgagccctccttcctctgaacttgaattctgctttgtttgaaccatccttagggtacttactcctctctctactaaattaggagaccgtgtggctggtgtgtgaagcagaactgattcaaatccagggtctgtcacttactcctcggcctcactctccctgtctgtggcatgaagacagtggtacctgtattggagggtcacttcgaggcttcagtgagatgaggcctgttgagtgcctgcggtggtgctgggtgctcactgcacaagaagtggtcctagtcattgctgtgtagccattgtcatcgctgccagctccacgtgggcagggccttgtgttactcagcacctgatacaactccctgtacatagtgggggccaatacatttgactggaaatgaagtggattgaattttaggctctaacccaatgaaattctgtctgtgcttaaaccaggaggacttctgattttcccagaacctcaagggccctcaggagcctcccgtgggggttaggccagtaactctgaagtaagagtcagctggtatcagtagcaccagggtgggctcttctatcccagccctctgcatgcttgggtgtcatgtcagaacatgaggaggagaaagggctgagggaggcgagttgacgctttctcctccagttcggaggaaggagcctgaactgccctcgttcaggggcaggggggcctgggtggtaaactgggcctcctcctgaccccagcaccttgcaagtgctttgcgtgtaaatgtttatggagtgaaggggtggatgagtgaggatgccacgcagtgtctgacctgcactgtgcagtgcagcctgcttccctaaggtgacagggagggacttttgaggtgactcctgtcccttcactgtcttctttctctgcccatgagctccttctgcagtgtcccaagctgctagggattgtggctgccagctccttcccctgttgtctgggagataaatacatgaatgtatgcttactgacgaatgaaaatgctgtttttcctctggaggcccagagggtggcctgtcaaactgtgagttctcagagtctctgagcagggctagcgcagcagaggtgggggccgtctgctgccacctcctgcctgcaggcccatggggctccatcaccacgacccagccccagctagacaggccttcctgcccccagactggctgctttgctggtggcactgcactggagagcaggaggctgcggccccggcagagcactgttggagtgctgagatggcatgctgcctccacctgcccctcctaggctggcagccatcctaacaggcaggttcctctgagccacggaggctgccccaaacaactccacctaaaagacaaaggccgggggagggctctgcctccagatgatgagatataccctggcctctgctctgtggtttactcagaataaactgttattttaccatcactctttttttcattttgcctctgaaaataaagctgagaaatgactaattcacatctcaggaagcctatgaagtctgtggttttcatctctagatcaatgcctaacagtaatggaaaagaaacgcttccctgggagtaggccaccgtggggacaggccgccttgagtggttcaggacaccggctagggctgcagtcaccttgtctgtgaaaatgggaggggaggggaggtttaaacttaaccctgtgaccttggccaaggtccatgactaccgtgtgactcggtctcgtcatctgtttagtggtaataagaatacctcccctctgatgttagcatgaggaccaggcatatgccaagagctccccacatattagaagccccactcctggcttctaaggggatttcttaaattgtaagttttttaaaaatctaaattttaatatctaatttaaaaatttctgagaggaagtttaaaaacagccgctgctgatttaaccacttgattgggctccgggagggaagccgctctgagtctcagaggcgtcccttccatcccctcaagcagcatctgtggtttataagaggagcgagtctgggaattctcttcacgtctctggcaggtaagggaggggctccctggacatcatctccatgctttgttcacgcggaaaagtttacctgacgagggctgtgggttctgtttaaatcctaggagatgcttaagttattagaatttttctctatttttaaagccagttgtgttaagaaataacagctgtccactgaagatggtggcatttatcccaaaaaggagtatatttttgaacggtctggtggccacagatgacatttatgaatgttaactaagtgccaggactgggcttagtgactcactgtatgtgcagtactgtatgacatcctcccaacggcccagtgaggtaaagatcactactcccattttacagcagagaaaagcaagccccagggaggccagctgactcagcatcacacaagatgacggcctttcccttccatctgagacgtgggtgggacgggaatacgtggataggctgccctaggccacgtgtagagatgagtgccacttctgtttgccccatgtcatagccataggacatggtggcagttcccctttgaatgactgtggtccctaccttcagagaaaatcagtctggaatgttgggaagctgtgatggtagagatttcttctcttgaaacaatagaagactgcctctttttccatgcattccatcaccagaccttgcacagtgacatttcttgaggccatcacccagccacctctgtccctgtaccaggtactgtggaggaggaaatgggcagtacctccgtgtaggaagagggtgtgggagggctccatagtctgggactccagtgctgccctgagccctgcctaaggcgagcaggaagccgcctgtgactcggtctcctcatctgttgagtggtaataagaatgccttggctgggcgcagtggctcacacctgtaatcccagcactttggggaggccgaggcaggcagatcactggaggtcaggagtttgataccagcctgaccaacatggtgaaaccccatctctactaaaaatacaaaacttagccaggcgtggtggcaggcacctgtaatcccagctactagggaggccaaggcaggagaatcacttgaacccgtgagatggagatggcagtgagccgagttcgtgccactgcactccgcctgggtgacagagtgagactctgtctccaaaaaaaagaatgctttgaaggcgagcaggaagtgccaccttcaagacctcagcactccaccctgaagcaggcagatccaaccaggccaaggctctttgcttcatgtcccagccgtcccatcacaggaggtgagggcccaggctgtgcgtctagtccagcagcactggaaatgtggccagtgccatctgagatgtgctgaagtataaaatccacagcagattaatatgaaagaaaaagaaggtaaatagctcattaatcgtttttatattacatgttgtaataatactttagataaattgggtcaattaaaaaatatttttaagactgggcacagggactcttgcctgtaatctcagcacttagggaggctgaggtgggcagataacttgaggtcaggagttcgagaccagcctggccaacatggtgaaaccgtctctactaaaaattcaaaaattagccaggcgtggtagcaggcacctgtagtccccgctactcaggaggctaaggcagaagaatcacttgaacccaagaagtggaggttgcagtgagctgagatcttgccactgcactccagtctgggggacagagtaagtgagactctgtctcaaaaaaaaaaaaattttgttttaattacatatgtggttcacactatgtttctattggatagtactggtccagagagtccgttagaacctagaggaggagggtgaacagtataatctttcttgtctattccctggaggtagcttgaacaacagatgttctagtaacccaggctgaagcgtcccaccaaagaaagttcctgaatgagttgtctctgactcgtgtgctagaactacttagagaattatattaaaaatccatataaaccatcttatctacatctctgatattaccatctggtgtagactgaatgtcatagctgttggttgttacagggttaattcattgattcttttatctgcgtgtttgctaacaagcacttatttattttatgatgtgtcagttattgggctaagtgccagattccaaaatgaatgagatttgattctctcattggggtctcaaaggactagtaagtagaacccttctctgtcccctgaattctgaaagttggaaaagaagacagtaaggtagatagatggggacccaaatatcaccttgatttctaaagccttgcttgaaggatgcagcttgttctaagagcccagtgagcttcccagtattgagtcccaggattagaccaacattacccaaccactcatagtggctttgcacttgtcaggcctccccatctgggggacatcggagaacaggcttaccatggagggcttactctcagaggtggggagggggttggttggggcggcacatggttgggtgcaaatcacacagggcctctctgagggagaatagatgccatcagaggttttcaaacagaagggtgacatagcgagacttagctcttataaggactactctgattgcagagttgagaatggggagggcaaggagcaggggacagttagaaagccatcgcggtcgtccatttgaggaataaagatggcactgggcaggctgaccgtggtgcaggtggtgagaagtggtggattctgaatgtaccattaaggtagaactcacaggatttgccgaaggattgccagatggactcaagcaaaagagaagaatcaaggattttaacctgagctgctggaagggtgaaatgtcctgtttaccaagatgtggtcaaagcaggtttgggaggaagcttcagagatacagttttagacttgtgtttgagccacctgtcaaatgtccaagggaatcaccaagagcttgtgttgtgtaatgagaccacccaacaatgaagtcatctggccctcttctctatctacacatgtccctgagggcctccactggtcttctagcttcctatactgtgtatatgccgacagctctcgaatatatacccctagccttcacctagctccttcacttctcttgaactgccaaattcaggctcctgtggatgtctaatacagtatttgtaagaagaggaaataaggatggatatactacttatttctgtgtaaatgagggataaaacagaagttatgtagttttttaacttttgaactgtataaatattttacaaattcagaaaaaatcctgaaattgaatatcaataaaaacaaacctaactgtatattaaatgataatataacccacacagaaaaaagaattagaatatctttttgaacacagtacttgctatatgcccatcacaggatatattctaaggactaaaagaattgctaagaaatcttgaacttttacctttagtagttgttaatgatattcgtgtagcaattctgaagaaattttgtgtttattgtaggataaggcaaatgaatagattgatgatgttagaaaccagggttctcactgataggaagggagctgcaaatatggaatcaaggaaggaggaagaacctggtggtgttggcttgcagtaagaaataacagtattaacttatgatttaaaaatatatagatatatacacactcatatttaattatatatatttacattaaatacatgtacatatttctctcctagctgtgtccactgaaaggacatagaacagtgacatcccagtggcaatgagcacatctaatgccccgatcttggtttctaaataccactccccaccaaaaggagctagggtacattaaagaaatggcagattccaagctgatttcctggagaaatggggtagggaaggtacggggtgattctggagcttcttttgcatcaaaaaccaaagaagtattcaaagattgatggagactcctcagtaacactggagatgggctaaaaaggttccctctggccaagtttggaagtttgaacatgaaagggcatgattataatggattataacacactgaataataaatgaacacccaggtccatagtgataccaaaaaaagtaaagggtgggggcctattacttataaaggaatgccagccaataaatatcgaggaataattaataatcaccaatgtgtaaccaccagtaaaataaagattcacataaggatcatcagtggatgccaaactattcagtgaaaatttgttagggaacaagatgcttaaaatctcaaattgcagtacagattacttattagttacaaaggagaaactatatcattgcagtggagaaatttggcagataccaccttaaccaagtgatcgaacttagcattatcaataactgattaataatacagtagaaagcacataccacccaggaactgtgtttaccaagcatgtattacccgaatctcatgacagggaacaggcagatccaacttacgggggacctcctccaagacaactggcaggcacttttcaaaatatgtcaacgtccaaaagccagtcccgtccctcctgcctccagactagataagggaaattggagagacatgacaaccagatgcaatgtatgctccttaattggatcttggatttaaaaaaaaaaaaaaaaagctatagagaatctgataagagaaatttgcttatggagcaaatattatgtcagtgttaaatatcttgggtatgataatgttattatgttatttatgcaggagaatgtccttgttcctaggagagagacagctggtagtatttagagatgtgttataacgtgtgcaactttcagttgctttgatgaaaaataaatttgcatgtgtgtttctgtgatagagaaagaaaagggatggaaagcgagcatggcaaaatgttaacggttgacgaatctaggtgaagggtatgtggacgttcgcttcatagtattctttcagcacatcaatagatttgatttttttttttccaaaatataactttggaaagcgggcatggcagaatgttaacggttgacgaatctaggtgacgggtatgtggacgttcgcttcataatattttttcagcacatcagtagatttgattttttttttccagaatacaacgttggaaccaggcgtggaggctcacacctgtgatctcagcactttgggagactgaggcaagaggatcacttgagcccaggagctcgagaccagcctaggcaacatagtgagaccctatctctacaaaacgaacaaaacttagccagggctgggcatggtggctagcactttgggaggccgagacaggcagatcacttgaggtcaggagtttgagaccaggttcgccgaaatggtgaaaccctgtctctactaaaaatacaaaaaaaaattagccaggcatggtgattcatgcttgtaatcccagctactcaggaggctgaggcaggagaatcacttgaaccaggaaggcagtgagccgagatcgtgccactgcactccagccttggtgacagagtgagactccatctcaaaaaaaaaaaaaacaaaataaaacaaaaaattagccaggcatagtggcgcatgcctgtagtcccagctcctcaggaggatcatgtgagccccagaggtcatagctacagtgaactgggatcacaccactatactccagcctgggcaacagagcaagaccctgtctcaaaaaataaaatgttgggggaaaatgaaggataagaggaaaggaactgtagacaacatataggcaagtctttcaagtggttttgctatttagagaaacaaacgtgggagtagctggaggagaaggtgggcttaaggactcgggtctttaagatgggggagatctaccatgtgtatgtgcagacgtgaagtgacacacagcagaaggaaacctggtggtggggagaggagagaatggctggtgcagtgtgtgagcaggccgggtgggtggggccccaccgctgatgtaaggcacagatgagatgcctaaaaagtcattgaatgagttttggttttaattcttaggcgagcctcatgagacagatactattattaaaagtatattgattcaatcttggttaaacataaaaaattataagattcaattgtatttatattaagttcctagaatttttcatacagtaagggagaagagattggaaaatgcttatttactggtgatttaagatcctaagaatgtatacatttatgtaggtgttatcttttattatttttaaaaagatgagacaaaagtttcctgagatattcacaggctcttcctgagatagtcaattcagagttcttagggaagatactcattctggaatattcatgggtaaatacatttgtttgttttagggaatggaatttccttaagttgtaaatgaactttgcagttgttaatctgacccatataaaaatcatgtgggctctttttccgaagaatcttagacctttgtatctgggttatttcacctttttgttggaatatactatacatcaggaagtatatacacataccttatgtagatagcttgcaggattttcgcaagttgaacacactggtacaaccaacccccagatcaagaaacaggccataaccgtcacctcagaagcccactgcttcatgtcacctgccagttaaccaccccccactccccgagcataaccactatcttgaatccccaaataatagattaaatttgtctgtttttgcatttatataaatggaatcgtataaaatgtactcttttgaatctggcttctctctacactcgtgagaaccatgcatgtcatgggtgtcgattgcatgatattccactgtgcgacggtgccacggttcacccgtcctgctgtcgacaggcattcgccgagcactgctgtgatattctggtacatgtctgatggtgacctcacacaggcgttctttggagtggagttattgggctggagaggaaggatgtgttcagccatagtgggtggctgtcagtcagcagggtagagagtcccccttctcttcatccacaacaccgatagtgttccctgttttttctttttatctattcaggcatgtttgtggtggtagctcagtggttttaatgtactgcttcctgatgacaaattgagcaccttgttatatgtttattggccatttgaatgttgccttttgtgattctgaatctctttgtaatgcttaccagttatgcaagtaaaatgaaaagggtggttctgtcagatcttaacccaaatccaaggtgaagcctggtttcctgcataggcgagaaggccccagggcccagaatccctcctcaccccttctgcctccatccagggccccactctggggcaggcagtgctggctgcattcagctcagtggggggcagtttgactatgtcgcatccagcttcccatgccgtccatccctaggagtctgtctcaccatacaagggcgcagacaggccagcttgagggtgttcatcaacgcagcattgtttgaagagcagaagttagaatctattcattcgggggcctgactgcataaatacactgtggttgccgtccagcagagcatcatgcagccattaactgcactcacatgggaaaatgcccacaatggcttgttgtttaaaaaaaaaaaaaagtgaaaaaatatttctgctgtgtgtggaattatgagaaatgtttaccgtctacgttatatatttttacagtgcttggatttttataatgagattgtttgaaaattttttaaaagataggcttaatattcccattagcagtgtcatagttatccagtagacttcctgaacaattgggtagtaggaatggattttcataacaaaagagtctttggaattgcaaaacttcaaatattgttttccctctgttttaacaggaatagttgtatattaagtaagacagaggatctttccatgttaaagttgttagaaaaatataactccaggccgggtgcagtgcctcatgcctgtaatcccagcactttgcgaggccgaggcgggcggatcacggagtcaggagatcgagaccatcctggctaacacggtgaaaccccgtctctactgaaaatacaaaaaattagccgggcgtggtggcgggcgcctgtagttccagctactcaggaggctgaggcaggagaatggcgtgaacccaggaggtggagcttgcagtgagccgagatcacgccactgcactccagcctgggcgacagagcgagactccatatcaaaaaaaaagaaaaatataactccaggttgcttttggctcgactagactggggttatttttagcttttgcctttttaagtgttggcagagacctgacgaggttatcacatgacaataatagctgccatgtattaagtatttgctatatatcaggtccttggctacatgctttacacacgggtcacatttaatctccacaattacctgaggaggagctaggtctgtggctatggctttcctctaggtgaggaaccggaggctcgggtaaaaagtttgcccaggttagtggccgagctgaagttaaaacaaagacacacaggcctggcgtgatggctcacacctgtagtcccagcactttgggaggctgagatgggaggatcccttgagcccaggagttcgagaccaacctaggcaacatggcgaaaccctgtctctaccaaaaatacaaaaattagccagtctcgtaacctggtctcaagataaaataaataaatagatttaaaaaaaaagccacagacttcagctctgctgcctcctgtgcccatagccctctgtctccatctttaccttgcggtccacaaaatcctagacaagtgaaaagacttttaaaaaattggaaatcctcatctttaaaaaagcttttcctaatgtcctcaatcacgcctccactccatttgtcctttttatgcatttggaaaatggggaatgtttattaagtaagtgatctctaaatccttcccagtgctcgacttctgagcccagtagaagacagggaatgaggaattagccacagcgtttctcaagattggctgcctcaaagttgtccaccttgcccttgactttgtgatcccgtgtggttgatgtttagagactccccaccatccctggtgagagattaagttgagacagaaaccactgctaagttgggaacccagctgctgctacaaatgacacagaaagaaggccagttgatagccacatttgtcagcaacaggcagagaccattgttaagcctggccgaggggcaagttaaaaatttaagaatgaaatattggcatctggcagaccacttgaagaaattgggttggctttgatgtctttttgctctgcttggttttctgttgagacatgattctgtgagcaggctacatcctctcctccggcccatcctctttctctctcggtagagaaggacattcatccgacagccagatctgtagcctgcgatggttgcccaagaaagtggctgctgttggtaacatcacagtcaatttatacagaaattgtttgtaagctcatataagccacccttcctctggaaggaatgactagcagattagtcactgggagtctctgaccttggggtaaatgtaacatggagcaagagtctgaggctttctgttctcaagttcaggtgaacttgaagttgctctcacagattagatagatcacaataaaatacaccagcatatggcatttccaggtgaaggaggacttttgtgtcctttcttagacatggccatgtgggaaagtttgcatgtctggcaaccccaggtgccgggaggaatatggagcaactaggactctcccaaccttgctagtgggactgtaaagtggcatagccacttgggagaattgttttgcaatatctgtaagaatcaatgtggcatataccctacaatccagccgttctgctcttagaggactgttggcatgtgttccaggagacatgtatgagcagcattgtttattaaagcaaaaatgctggaagcgacccagtgtccactgacaggagagcagataaataaagctgggattatggaatctacggaatttctcagcattgaaaacgaaatcactgatacaccccagcatgcctgagtgtcaggcctgctattgagtaaaaaacaagagcgtgagaatctttacaatatgccatcacttaggtaacgttcacaaacttataagttaaactgtatatgtcgatataaactatcctgaaaagtaagggatgataagtctgaaagtcagagtcgggctgcctgtagggaagagatgtggctgtagaggagcacatggcagcaccagtggaatccatccgcttctcgagctgcaccatccagtgtgccagtcaccagccccaggggctgtttacacagttaactcacagttcagtgcctcagccacagcagccacaatcaggcctcagtagccactagtgcctgtcgtgttagacagttcaggtaccggccgcctccatcgctgcagaaggttctgtttgctaggccagatggtgggtgcctggatttgattcattctctataacttgtacatatatatatttgtatgaaatctttaaattttttgttttaacttcaattctagaaaattactaaagagacgcatatacaaattctacagtgtaacttcctaagtgtgaaaagcaggggaatagcaagagagcagttggtggcactgcctgcgacgcagcagtcatgtgggaacactcccttcacgtcgccctccatcccagatgattgacgtgcatgagaaaggggcagggagagtgcatctgtctgtctgtctgtctgtctgcctgcctgtctggagccgttggcgagattgccctaacagcagtgttcatgtgagggcacctgtcgtttcctccccaccctgctatcgcaaagcattatagtacctcctcagcactcaaaggcatagtgtgaatgaccttgagaatcacctgaagcctgtgctgctaacccaaggtttcaagaaggatgtgacaaacatactgtcctagttagtgctgtcctcgatttccagcgttgagaaggttggttgtcatttgaaagaatctcttctctctgcctgatttatggcttcttgtgctagagctggctgtgctgaggtggataccctgaggagggagatttattggtaggcattgcactgtctttaggtgctgacatgttttcccagccttgcccaaggcagacaagaattgtgagtgcaataataaacctcttgagttccatcaacagctcataggcagaagtgcccttagttggtccctgcccttgcatgaacctgagagggttttttggtgatcgacctctacacctcacttgtctaccccagttccgccgtggtcatgacggcgcagttgtgaatcttgccagctcctcagccccatgcctgcctgaacagcaactcagggcagtagacagtggagaaagcggaagttggctcacccagcctgaagatctttgagcaccagagaacccacgcatcctgcccagacttccccatttgtgtctgctttccctgcttcagtcctactcaacaggatacaagtcacatggattaggaaactgctctgacagcccatctgacttgggaacctgcctggtgagggaagaggctgtgtcttttagggacactgtggggctgccatcagaagacatggagtagggacagcaataggatccgtatgcagggaggcaggttaaaccaaagagggaaatagactaataggctaaaagccagattgagacttctggttcagtgccaaaggaagagaagagtgggcatttataaggtctcatttacttagaatagtgagttaaatgttcagtgttgcagaataactggatgaagatctggaagcagctgggaaataagaattcggtatcgatcgaccttgctatgcatccaagctccttgtgttgagcgggtgccgtgtgccaggcattttgtgaaataccttattgtattatccacagtaaatatctcatttaatctacatcacatcagccatctcaagaaatataatgttatctcactcattttccagacaaaataagggaaagatttagagagatgatatctaagtatttgaatgcaaacattctgactccagtgcacaccccccttttagaaaattttttggccgggcgcggtggctcacacctgtaatctcagcactttgggaggccaaggcaggtggatcacgaggtcaggagatcgagaccatcctggctaacacggtgacaccccgtctctactaaaaatacaaaaaaattagccaggcgtggtggcagtcgcccaggctggagtgcagtggcgcaatcttgcactgcatgctctgcctcctggattcacgccattctcctgcctcagcctcccgagtagctgggactataggcatgtaccaccaggcctggctaacagtgcacaccctcttaagcatcacatgaaggattagactgttcacatccatgttgaagtataaagaaggaagtataaactgtaaatgggatccaccctgcttgggtgaagagagagaagaggcaggacagaggggagcgggagaagtcacaccatcccagttcatttgaatgcgagggatgactgctgacatatgagggctggtgttgagagcctcctgaccctgttgagctgttccaggtgagctagccaggtgcagcagcttcctgttgacttgtgtccccatctggggactaagaagggctttctgcagctctggccatcacacagctgtgaagctgtttggtttgaccacatgtgaatgcgggtcaggccctggcttttctctttggtccagagcgcagtgggtgcctaggtaatttgcaaagggcaggtagtttatctgatcctgcctggccacctggaaggtctttagcaagggaactgaactttggccttgttaagtcacgtgcagcaatagtagacagagtgagagccatgtagtgcaaggtgccgtgctatttatttggagggttgttttgtttggttttctggtttgttttgttgtactaaattgctggaaaaacttgacagagggagtgctttttatttttaaaactacaggtatttatttttccattgcgtaggacagtgttttgttgcttaattttcagccaatttcaagtatttctgctgttactaaaagaagcagtcttcttcctgggatatttttgttgttggttggtttcttcatttgttgaatatatgtttactgattatcttctatgggccaactgccatgtcagcactgggaaaacaggcatgaacaagacaggtacagtcctcagggaacttgtcccccaagcctttatttttttgagacagggtctcgctctgttgcccaggctggagcgcagtgctcactgtagcctctaactcctgggctcaagcagtcctcccacctcagcctcctgagtagctgggactacaggtctgcaccaccatgcccagctaatattttgtaggtagagacaaagtctcactctgttgcctaggctccaactcctgggctcaagtgatcctcccgccccagcctcccaaagtgctggaattacaggcatgaaccactgcgcccagccatacttgcattcttgtgaggagacaggtttaaataaatcgattaataagatgttttcagacactggaactggttgtaataatgctgagatgaaggaagactgccagtgggcttttttaaaaaaatagctttattgatatataattcacatatcatacaattcattcaaaaagggtacagttcttttttttttctagtaattcactgggctatacaaccatcaccatattctaattttagaatacttttgtacaccaggagaaaaaactccatactgattatagcagcccctctccatctctgccccgtccagtcttaggcaaccaccaatctactttctgtctctatggatttgcctattctggacatttcaaatgaatggaatcatacaatatatggtcttctgtggctggctgctttagcttaaataatgttttcaaggttcaactgtgttgtagctgatccgtacttaatttatttttattgccaaataatattccattgtatggatataatacattttatttagtcattcacaaacatggacatttgagtttttcccacctttggctattatgaataatgttgctgtgaactttcctttgacttacctgtacaagtctcatggatttaggctttcatttctcttgcaaatctgcccaggagtggaatttctgggtcacatgtcaactctgtgatcttgtgagaaactgcccgacattttccaaagcagagaaaccatgttacattcctaccagcaatgtgtagggcgttcagtttctccagtcctcaccaacacttggtactgccttttttattagacctagtgtgcgtgaagcgttacatttccttaatggctaattatgttgaccgtctttccatgtgcttattgccaatttgtgtatcttctttggagaatgtctgctcagactctttgcccattttacattgggttacatgccttttattctagagctgtaagaattttgtaatgttttctgtatacaagtcccttatcaggtatagctgaccctccatatccgtgggttctgcagcctctgctgattcagtcatggtcagaaatatacagggaaaaacaataaaaataacagtgtaataatgcagattttaaaataaagtataactatttacataacatttacattgtatttggtatcgtaagtaacctatagatgatttgaagcatgtggaggatgtgtgtcatacacaaatattccactgttttatataagggacttgagcatcgtggattttgatccccgcagaggatcctggaaccaagcccctgaggatgctaagggatggctgcatatgatttttaaatagagtcatgctctgcataacgacatttcagttagtgacagaccacattataacatatgtagggcagaccacattataatcttatggtcccataagataatcataaagctgaaaaattcctgtcgcctcgcctgatgtagccatcattacatccagcgcaatgcattactcacctgtttgtggtgatgctggtgtaaatatatagcacatatggttatgtacagtacgtagtacttgataataaatgactatgttactggtttatggatttactctactttttatcattatttgagagtatgcttctgcttactaaaaacaaaaaagttaactgtaaaacagcctcaggcagatccttcaggaggtgttataaaagaaggcattgttatcataggagatgacagcttcttgcattttattactctgaagaccttccagtgggacaagatggggaggtggaagatggtgatactgatgatcctgcccccgtagacctaggctgattaatgtgtgtctgtctttgtctttaatgaaaagttttaaaagtgaaaaaaaaataataattttttaaatagaaaaaagcttaaagaataaggatataaagaaagaaaatatttttgcccacctgggcaacatagtgagacctcatcgctacaaaaagtttaaaactgagccagacattgtagcacttgcctatagtcctagccactcgagaggctgaggcaggaagatgtctgagcccaggaattccaggctgtggtgagctgtgatcacaccactgcactctagtcttagcaaaagagtgagaccctgtctcaaaaaaacaaaagaataaaaatgttttttttaaattaaaagtttataaagtaaaaaagttacagtaagctaaggttaacttactgaagaaagaatattttaaaaataaatttagtgaaggttaaatgtgccatggttataaagtttaccctggtgtacaggagtgtcctagaccttcacatttactccctgatttactcagagcaacttctaggcctgcagcctccattcgtgatagtgcctttcacaggtggaatttttaatcttttataccatttaccgtacttttctacatttagatatggttggatacacaaataccattgtattacagttgcctgcagtactcagtacagtaccgtactgtacaggtgtgtagcctcagagcaatgagctattccatatagcctaggtgtgtagtaggctatcccatctaggttcatttgagtatactctatgacatttgcacaacgaagttgcctaatgatgcattactcagaacttattcctgtccttgagcaacacatgactgtattttctttcatcctgtgggtttgttcactttcttagtagtagtatttgtagtgcaaaagttgttagttttgatgaagtccaattttctatttttttattttgttacttgtgcttttggttttgtatctaagaaaacatggtcaaattcaaggtcacaaaaactgtttttttctgagaggtttacagttgtaactcttacatttaggtctgatccagttcaatgtcagataggagtggtgagaacagatgtcctagtcttaattcctgatctttggggcaagtctttcagtctttcaccagggcccagaggattttgaacaccttacttctgattcagtcaccgctgccaactccagagccttgcacatgtcacttgttgcagtttcttaaagaatgaagaggttgatgcgaaagggccttcctttccagttctcacatcctacacatctgtgatttgactgggtgttctttcttctcagccagttcccttggatgttagttagatcatcacacaaactctgtaaggacacttgggaatatttgcaagttctttttccatatttatttggactgcctttgatttccacaattccttgatgaaaattgcaaaaattgaagcatgtaagcagaaatgttttgtaatggatccatacgtcctttcccttgaaactctcaacagccaagaaaaaagatgggtttggggacattgctcatttccacaaaaggtcaatgaaccatcgcttcttcccactcccatctaacagtcagtaccctctttgttttcagactctcagcgttctcatctctcttccttcaccatgaagctgatggacaaattccactcacccaaaatcaagagaacgccatcaaagaagggaaaaccagctgaggtgtccgtaaagattccagagaagcctgtgaacaaagtaagctgactctggatgtttctcctggcctcacctgcttccagcaatatgagtttgtgcgatttgtatgttccctccctggggattgagctttcagtgcatcatacctacttcgtagcattccatgggcgggacctttggtgtccttgtaaaataagaaccattaggatggtgagtgtttgccacgttagccaagctcagttggctaagacagttctccttttccagctgtgtcatcctctgggcatttaaaacagctcagcacatcatgtccacaccccaggctgctgcctccctgccctgcagttccctacgttgccttggcgcacactcaaacacagggaactctgtgatgtccagaacatccatcatttggctttagggcctgtgctctgaaacatgcaaaccccttgagacacagccaaagatgtcctcaagagttagtggcctcagcagggccagtcaagccagatatgttgaaacagctattgactttcatcaacccctcccttcggcctcaaacagccatttcaaactctgtaggaatccaggtttcctctcttccaggaggcaacagacagatttctaccagagggctaccctctccccttggatctggagcagcaggcagtagaatttatgtccaccagtgctgtggcttccaggtctcaaaggcagaaggtcagtgtaacattaagaacaattgggtttgccttgccttctactgcagaatcctggtccatggttttggggatggaaaaaactctattgcactattattatgttcaactgggtggtgaccgtgggctgaattgttcaggaaagagtccaggggaccttggataaaagtgagagtttatgcaaggtcccatgatctttggagagagctttgtggcaaaagcttagggattctttctggggttggtttgggtgtgctgcttgggtccaacgggttccaggggatgtgggcgagtctcatctctcaagaccagctgttccttgaattgctaagatgatctgaatagtttagaagggaaaaggcttctgaagcctccgagtgctttcttacccatctcacaaggctggtggagtgcagtgagaccgccgcataaccaagtgctctcagagccccagacacctgtgtccctaacatttatggagccttttcttggtccagtgctgagtgctttacatgtgtcctcttacttgtcttcatagcaaccctgatgtgtgaaaagttattttgccaaaaaggaaactggatctatagaaatattaagcatttagccaaagtcgcacagcaaaaaggtggcaaagtcaagatttgaatgcaggctgtctgacgtcagagtctgaattgtcgagatgctacgtttcctctttatgaaagacagaatttttaatatctcgtgaatttaaatattaatcctgactcattacataaaaataaaactaggctgggcacagtggttcacgcctataatcccagcactttgggaggctgaggcaggcggatcacctgaggtcacgagttcaagaccagcctggccaacatgacaaaactccgtctctactaaaaatacaaaaaaaaaaaaaaaaaaaaaaaaatttagccaggcatagtggcaggcgcctgtaatcccagctgcttgggaggctgaggcaggagaatcacttgaacccgggcggcagaggttgcagtgagccgagatcacaccactgcactccagcctaggtaacagagtgagactctgtctccaaaaaataaataaataaaactaaacttagcaatgtaaaataaaataaaccttgtagacagatattcttaatcctttagtgattatccaaagtataatttctatgtagcagaactactgtcacagccatccatttaatgccgctggtaaacactagcctgttatttaaatacataattcttgaattttgcagttcatctatttttgggttttatgttgaccagcagaatatcttaaaattttagttaaaagtggaggaaaataaaggttttaaatctaaaagtcttttgttgaaaagtggtttttcctgccccctcttttaacgaaaggtgactgacaagcaagagggaaacagtcagtgtttgccagattgatctaaattccagattgaagaagagtaatacagtagatttggtctgtgccacagttattttttattgcaatctgtttagtaacctcttgtagccgaatgtagtattaactacaagtagagtgtaattgtcatccaacactagtccaggcagtcagagtaaaatgattcacttactaacaacgttatcctgctagtgaattctgatatgaaactgttcggccactcaattcctgggatttcccccctttttgttgtttttgttgtttttttgtttgtttgtttgttttgagataagagtctcactctgtcgcccaggctggagtgcagtggagcaatctcagctcactgcaatctccgcctcccaggctcaagcaattctcccgcctcagccacccgagtagctgggactacaggcgtcctctaccacgcctggctaatttttgtattttttagtagagatggggttttgccatgttggccaggctggtctcaaactcctgacctcaagtgatctgcccgcctcatcctctcaaagtgctgggattacaggcatgagccaccgcacccagccgggattttcccctttattcatttttccaagagaggtcacagagaaaaattcagtgctaaagtaccgctcatttagtggggtgcctgtaaaccccaggggccatttggcaatgtctggagacatttttggttgttgccataggaaggcaaagcagatgttattggcttctagtgggtaggggttgggaagctgctaaacatcctacaatacacaggacagccccccacacaacaaagaattctctgccccaaaatgtcagtagtgccaaggctgagaaacctgttctgtagcagggagctgtaggtgtgatcttcacccaagaaggaatgttacccctttttcatcattgctcattaggaagggttggatgtctgtgttctgtcccaagccacctgcgtgggacaagtaaatgcgaacctcttgcttcgtggaggcccatggacagaaccagaagcattgagaaacttcccagagtacgtggacttagaggattatgtccaagaaaccttgcagtgggtctgtcatctgctgccctcgttgattattcattagctctcttaccacttagggagtgattacgtacattcttattttacttcaggtcatatgcatggctttccctgctcagatacgagggaaatggaagtgcagggagatgaaagtacagattcagattcgctgccacttcccgagggctccttctcgccccagccctgtcctgggtggtttcagacatgctgtcttatttactcctcaccataattgtgtggggaagcttttattattcccactgtgcagacagtgttggccctggtgcacattttcttgatcaaaatctgtttttctcactatattctgttgtcttcccagactgattccacattagcagtctcttgcatcttcttagtgaatttaaaaattcaaagtacattgtgatgaacttctaaacttttttgcaaccttttaacaagtctagcagtgagctgcagagtgttgaagttgtagaggaaatttagccatatactgggtgtccaaaggtataattacaatgagcagtgagcagggggtcctgggaggtgttaatgccccatctctgagggcatttggacagagattggatccgagtgctcttgggtggattcctgaaagcctttccccttcagctcttccagggagatgctgctgccggacagcctggtggcaggtggtgatttggtgctctcattgtaaccaatgtctgtgttcgacatgtcttcttgctaggcctcactgttctggactaataggaataatgttgcattgccattttttttttaatcctgcaattctagttttttattatactgattgtgacttgccctccccctcactccctggctttacccacattttcagggtacactgtcctatagtgtggaaatgaggcttatgttgctgtggagaggggaggcacccaggctgcagatgggacaaggagtgacagagcaagtcgggtgtcccggctgcggcacggctgtggggagagaactgtctggagaggagggccagttttcctcaccctcttccccgccatctcctgtggcagcacatggctgtggagccacagcctgggcgtcagaaatgaatatggcccacggggcaggaaaggcgatgggggttttatgtccatctctgccatcggggtcttagtttactcgtttgttaaatgagatctttttgaccaggggatctcaagtaaactttttaacttcagcacatttctgatctggtctttattctcctctctatctctccaggctctgaactcagacagaccaagttcaaattccatatctgtcactacagctgtgtggccttaggcaagttgcttaacctcccccacgtcccactaagcctcagtttccccacctgtgaaataatagtatccacttcacagggtggttgtaacctttaaacaaaatagcctatataaaatccatagcacagtgggtgcctccatgtccccgatgagtggtagctacgatctggcctctttcttccctttcagatgttcccatcctaggccctctttctctgctttattactggcaggtatatggtctctggtgttggtatagtgcctgttaaatgttgtgaaccacttcatatgctttctcattcagtcccccacagtcacctctttagttacacggggcagatgttattctccccattttgtgggtgacaagcccaaagcccagcagttggctttgtctctaagccatccccagacacggacagcctcatttagtttccaggcttatgtggaccaatgatggcaatccatcccccacagcaggaggggtgcgcaggtgaacgcacctgccctcgggttatgcagcgaggcagcttcagcaaagccaaggcatggagtccccagtccgagccagtgctggatgtggctgtgtggctgtgaactctcactgctggctgcattcacaaggatccccagcttgacagctgaaaggctggagaatgcacaacacccagaggccattaattctgggagtagaatctgagttcacggaggcagcctggctgtgctacattgttggctcctttaggaggagcccaggacagcctgactcttaaacagctgatttgatctctctgcaatgacagaaaaactctctgctctgaagtgccttgccactttcgagtgcctcccatcttcagattagccactttctccctgtgtgacctgatgacacattttcttaaaatgtttcctgttcctcagcaagtttcatcattgctggtctctaacactttctgatgtgctaaggtggcagtgttactgtcatagtcctcttcttgcctggttgaccatggctttaggcacatctgaggtctgtcggcactgcgactccttcacactcaggttcctccctgccccgggcagatgacatgaagcagagagctcttgtccacgaggtggaaaagtaagcgcccagcctcttggaaacagaccgtaaacaaatctgtcaggtagtgaaaagagaaaaataaagccagggtgcaggacccagggatggggatgaggaagggcacttcccccaccatgggagaattgtgtcttctagtctgcaggacaccttgtgggaaagactcaatgaaagaaatgactgggtcttttgtgcattgtctgactaaagtagccatttatatatttttcttttgacattcccatgaaataaaagcctctactattgaacatttttatatttaaaatgatattctgcacctttttttaaactttatttttttaattgagacggtgtgtcactatgttgcccaggctggtcctgactcctgggctgaagtgatctgcccaccttggcctcccaaagtgctgggattataggtgtgagccacttcacctggccaatcggcactattttagaagaaaagagctagtattcagaatcataagcactttttattaatttctaccatttgtttgtctgtatattgtttaaatcacctttttctagaaattatcttcttgccctcagtttttatttatatcctctagacctctgagatcctgcaggtggctgtttgcctcatacacacccctcttaatttgcactagacatgtaatcgactacttgagtacactgtccattttgggatttatccattctgtagactactctttttttttttttttttaaaggacagcctcccaaaccagaacaggttcagagactccacttctgtagattactcttagcctccttttcctgccagccagctgagacctggatcattgacatcagggcaagtagaggggaagttggagagaagaacaaaaggggtgtgtagacccaccaactggatccaaggcctcccacggtcagggagaaaagcttggggttgtggcttaaacactggaaagcgcagggctctgtattttccctttctctcaggtgggcttctctcaggagcagagggaccatgaatgctgctagcgcccactgcatgagtcgtgattgaatcttgagaatcacggtcatctgctctggcttctctgccttttctccccagatttcctgccccttctagccctgggagcttccaggcccttgaggaatagcatatcatttccttgagtgggggcttcagtggggtgaacaatctgggaacctagtgaggagtcctgagggaatgggtttcagcccctcatgccctggaccagtcttacacagtctttcagatctttgaaacaaaagcctggagcttcttgatgtgatttacaggatacagatgtaccatgggccttgactggtgcttctccaagtcatcagcaaattagtcctcactctagttaacagggttagtggtggtctgtcagtgtggctgatgaggacagacaggaggataagtggttttcaagacctcagggtctggaaagggaattcagaaatttctgaatgagctatcttggtccaagcccccttcttccttcagctctaccctctgtctcctgattacaatccttagaaaaatgatctggcttggtttctgtagcaagagcctttccattcctatcgatctcaagctggtttaaagaaaatgttcctttattttttcaaaatagctccctttaatctctctcctcctccttatgcctaacgtctcctttcagaacctgagctggctggaggagaaagagaaggaagttgtcagtgccctgcgctactttaagaccattgtggacaaaatggcaattgataagaaggtactggagatgcttccagggtcagccagcaaggtgctggaggccatcttacccctggtgcagaacgatcctcgaattcagcacaggtgagtggctctgaagtctttggctgtgtcagaacaatggaagccttagaagcatcttggtttggtggcactggaaactcaaggttcctaggaacagtcaggaaaaggactccatcacccctcatccttcccctgaccactccccccacaactatcccgtgatgccatctcagagttgaggtcactattactcctgaagcccgggacacatctctgccatccctagggatgtggccacagtgtaagtttgtggtcattgcagaacttaactgcgtcaagccaggacgcctcccggacatggagcctggattcactgcgggtgggaggagcctgttttgaatgaaactttttgagtttcattatctgtcaggtggaagctactgtttccactcatcgccagaggcccagactgaagagcaccagcagggcctccatctgcatgagtctcttcacagacttcactgccaggggctggattgcaggctcacaagctaagagttttttagtaccttagaccttgggggttacacagcagcctggaggctgcacagggaggcgaagaagcacaagctgggagagagagaagggaccctatggaccagcgccgcttttggggttattgggtccagggcgggccttatccaaacaggcctcctgcagggagctttaattggtgggtttaaagcaagcaggcacgtgttcaggaggcgcagcctttgactaagaggtggttgctttaagttctcaggcaaatggtctgtttaaaggatcagtaggtaagccaggagctagcctgctggcgggcaaagatgcctgtaagtttctgtctctggccaccagctagagccagtcgggtagggtgtagtattaggaaccttgtcaagggttcgtgagccctgcttctggtatgagaaagctaaacatattttaaaacagatgccgaggcaacataaaattacaagcactcgctgcaggggacatggagccggcctttgccccaagaagcttttgttgggtaatacttttattgctggagtacattttcctcttaaaggttagctagcagcttgtcctgtatttattgttaaatgtaaaaagaaaagcactaccaaatgtaatctgaaatgaaagcctagcaggagctttttcttaagaggctggcacatgttttgtttttcttccatggtacctgttcaggataaatgcttctctgtcgcaattccgcaagatgacttagtgttcatttagccccatgaggctaagcttttatgaactgctttcagaacttggcaatgaagttcatagttttcttcttctgggggataaagcaaatagtgtctttatttacaagaaactctctgccctggggcttcctccctggagtttcagctgacgcgtggagactgtggtcttttggccagaagctcgctggcgctggttggtgacgggaaggaggcagggcatgcttgtcttcactgtctttcccagagtcagtccagctccggctcttagaagtgttcggtgctgggctcctaggagcgcatgtgctgacgtcatgccacagcgagatgtatggattccctcttagaacatgtttttgtggacctagtctcatgtggtagtctctgccttggaatagttaaagcctagttgaaacaaatcagctccctctgttctacgataaagcacttattttacggtacagggaggaagctgtgttggagtttgaagaagggagagttacaggggtgttggagttgatctgatgaagcctcttgactgagtagttcctggagcccgacctgagggaaagcagcagttggattggcagtgggggcaggagaacaagagcaaaggaactgaggccactgggcctggtgtatcccggggaggggagggcggcgactcgggcagtcatgggcagagggtatatgtcctagagcatggacgagaggggaacagtgggaagaggcgactgatcaccctgcaccctcaggcgctaagcctctttgggagagtccaggatagcgtcccctggaccctcacacccagagtgtattgctgctaggagtgttgcttcccagagccaggctctgcttggaggtcacttgcaaaccctgggtaagaactgatgaagtcacatggtaatggctgggggtattttttgtctattgaggggtggctcttaattgacattgaatgtctataaccatttcctagaggagaaaatgggaagtgcctgggtgtggctgtaaggacccatgaaatatggtttgttttctggtagtcctttgactaatcccattgaaggggttttccttctgaaattcttccaggctagtggaggtggttttcttggtctcccacagtgattggaaatacctcctcagatgctccttttagatgctttgcattatctctttcctccctaagtgcagtttgcgagctggaaggtcctttctcgtttcttccgtggggcagggagtggggggtccttgcaaacaggccctttgccgccctcacctcggttcctgagacagtgataggctggcctccaacaagcagctggctcttagcatgagctttgaatggaggattcccgagtgaggcacgcagaggcccatgtgagagcgagagtcacactcgtcacatgcggagggctttgctccattgtggaactgagccagcagctgggcctcagatggcattttttatagtcctcaactttccttcctttcttatgtcttagccccttgacacaggaatattctgcttccaagctaatgacgggaaggctggacataattccagcaccttccgggaaacgttagcatccaatgcaggtagaaaggaagtagtgaataaaagtgtttcccctctttcacctcactgttaccagcagtgtgacagtgagatgctttctccggtggaatcctcctacagcacatcaggggaaggcagcaggcttctttcaagatgcctcacctggccttgccaggaagcagagcgaggtccagcccagccgttagaagcacattcccctgcaggatcagatcagctctggtccaacccccggagagactgcagggtctttgttttcccctctccgtcctctttcctaagagagtagttccaacaacaaatacttttcatccatataatcttctaaaatacccaatcctggctttctcagggctcctttaggaattttgtttgtttgtttctaatggacttgaaaagtttgctttcattcctgccgacccttttctcctgttggaacatgcagagtggaacgcctggctaaatggaaactttagatccttgcaaaaattgtttcctccttgactgattctgaagagcttctcattaaagcactatttggttcacatttttgttctaaatagctttgtttttagaacctgttttaatcatatcttacaatattatatattttcctcaaagttatatctttggctcctaaatctgcatcattttggggtgtttttttgttttttgtgtgtttttttggagtagaggaggttgcagcacataaattttctatattgttgctcttcctctgtgataattgtttgaaatggaaaaataatcctttccacaattcctagggaaaattatctttagttatttaaaaatacgtgaaagatgtaaaaattctccattcggctgctactctacaatcattgaggcactcagggcttctgtttgtgggcgctggcatcacagtgtagctggtagcgtggtctctctctcacacacacacacacacacacacacacactcacctgcgttcccatcctcacatccccaccaccatcacaggccccgtcacccctgatttgctattctcaaaatagtcttcattcgtgcgctcctgacgtctgtctcatcgttatagtgcagaagatgatgaagctggccccgtgacggaggaattctaataaactgcagacctgttttgagctcatgactgttaaaattccgcaaacctgtcggctccttgtggcacatctaaaatagatttgattctaattgctaacaatcagtatacactgcttggacctggtctagtgattagcagctagaaggaggggaagatggggcactccttgagagatgtgatcagaatcttgtagaaggatgtgaagtttgaaaaagcatcttaactatcgtggtggaatttttgtaatgttacatttgggaaatgaaaaaaattttgaaacacagattagaatataaagctccacaaaatctttgttggatgtatggaaaaagtctcatgggagaagtttgcttattaaaaggcagtatggattttgcacaaagaaagttggagaaacacacccttgtcaccgagaagctggctctgtgctaagtgatggtcatgctttagattttctttttttccattcttctcttccctgtagctcagccctctcttcctgctatagccgagtgtaccaaagcctcgccaacctcattcgctggtctgaccaagtgatgctggaaggcgtgaactcagaagacaaggagatggtgacgactgtgaagggggtcatcaaggctgtgctggatggagtgaaggtaccggtgcaggttccagacagtcccagtcagggacttagagcagcctgcctgctggtgcttgtcacataagagcttgctcctgaccttcaaacattagaatgtctttctgcgtctctggtgttggtgcgctctatcccataactacttacttctctcaggactggtgcgaatggctcttagggaaaagctgtctagagcagtcagcccttactgagcactgcattaaatcttagtgagtcttcgtagcatcgtgctggctgagcatgcttgccagctagacaaaatgcaatggagatcgttttcacaatgactttaagcaaagctcccagcatgtcatatcagcactaccttttcatgttctgggagcttctaggattcttggtagaaaagcaggagtgagatgagtaagaaatggaactttctgtatttacttgatatccatgatgtggtctgtgtatttgctatccagagaagtcagaaacagcataagaaattgtgaatcctagttaagatgggaagcaaaggccatagaaggtctggaattggggtcagggggacaaatcctaatagagaaaataagtcctagcggatgggaagcaagacagaatgttggacatgaaccaggtaagggcctttgggtcagggccagggctgcaggcagcaggacagtggaaaccccgctgttgtgtgaggccatataatgtagtagaaaggggccagccttagcacctggctagatttgaatcccaagttcaccacttcgtagtctatgaacttgaacagtttactcaactgctctgcaccttaagtaactcttttatgaaataggtataataatagcatcgtgcatctcagggttatagggaagattacactagtcaatacacataatgcttctagaacagcacctggcacatacggagcagtcaggccttagctgctatttattattaattatgtggtgctagatgcatgctttgtaaacagatctcttggcttgaaaaacctgtgtccctctcctttctggacccctcaatccaaaattatagctgaggtgtttaccccaggtcaaaaaaaattccttcccactcaacgaggctaacaaattcctgaaaactgcctccttggcttaacattccccagcagctctggagagtagaataaggacccccaaaggacttaaattatagagagaggctgagaaagcattgctcagcattgcaaattgctccagaatgaaatatgtgtttgccaggacatctgggtggccctccaaccccagcagcatttaaggggaggctgacgtgtctgctggggccatagagttcatgtaaaaggggcttgcctagatgacatcaatattttcctctgaattctcccatgttctccttttttttttttttctctgagacggaatgtcactctgtcacccaggctggagtgcagtggtgcgatctcggctcaccgcaacctctgcctcctgggttcaagtgattttcctgcctcagcctcccgagatgctgggattacaggtgtgagccaccacacccagctaattttatatttttagtagagatggggtttcaccatgttggccaggctggtctcgaactcctgacctcaggtgatctgcccgcctcgacctcccaaaatgttgggattacaggtgtgagccactgcgcccagcctccccatgttcccttcattccaaaaagttactagtatctgcttagggcagcgagactcaaggatgtagcccagggtggctgttgtgatcagagctgatggccctttccaggatttggaggacaggcacgtacattatcatatctggtcctcacagtagcacactgggttcagcagagcagagtggaacgtggcctggggctttatcagcagccctgagtcactctggcccacccacccctgctgttcctgtctaggcttctgaaaatgctattattgaaaattgttattcttcaggtaacattgttaaggtttccttctatcgaattgattctgatgagatgttcacaagttagagcagccaaaacagaggagaatgagtttccactcataaagctctgtggcagtcccaagtacatttcctctatggagtcattacagcaccacttcattagtagaaaggcatgtctgaaagaaaaatttccttgatttttcaaagtgactggggaaaaaaaaaggagagagaaacctataggttatgaacttgtcaatgtcagagcaaataacttttccacaattgctttaaaaatattttagccagaacaaagattctctaggtgagaagctttacaaattcagttttgtttcatttattcaagaagcatttagtgagaaccttctatatgccaggcaatgagagataataggaaatatgagcaaagctggcacagaccctgccctatggcacttacagtctaaggggggcaggaccgtaaacacaaaggcacacccatgtggtatagcgctgccaaggaagatggcacagggtgtgatgaaagggtatgatgaccttcctttctcagggtggtcagagacgcttccccaaggaagagacaggccagcatctggaggatggacaggagctgcctgtggctgggagcttttcgtgctggagtcattacagacagtgagagtgatcgagacactgtgacgctggcatttgttgttattgtctaatagtaataacagctaacatttatggggtgctttttgtacactgtcctcacttaatactcatgacaaccctccataataggcataaatggctgccccttgcccctttcacaggtgtggagactcaggctcaggtggagcagtagtcagtggcaaggctgtgattcccacccccaacctgctgccccctccccggctcctgtgcaccatgacaccctgagctgctgcctcccatgggaggacaggattctctgcactcccacctccaagctagctggcttccagcctctctcaccgtccctttcaggcctgggacaccttaaaagcccatgccctggtggcgtgagagagcctcccccagctgggagggactggagctgtgcagaagggaaatgcactcatgaggatgttgtcagcccacttggaggaggggcgttggacgttcttacactgactcaccgttgtttacgtaacccattcagttgttcaagggagtctttcctctttttttttttttcaaatgattgaacatgggttgtaaaacaggattactttggttttgtccctgaatgcgtggtagcatttatcatttaaacctccacataaatgccacttgttcaagctgtataaccttgggcaagttacttccctgagtttcaagtaggttttaaaatatttaccctgaagatttgaggaaattcagtaagataaagtatataaagtacctggtaagaactaggtgaccaggaggcagtggggaaacagtgttacctggagaagtgttcatttctaacggctcacagtgaccatttttgacagtgattatggctcttttccaggtagtcttatcatctcaggtaaaagatagacccctgtcccctcatctggctctggggctgcttttccaccgggagcctgtagctcagagctgattatgactcttgaaggaaggaaatctgaggaatttaaagaccctcaatgtttttctctgagaaccacacccagcctagcacctggatgctggggggccgagccactcgaggccaaagagatatcccagcatgaccttttgaaatcggtaccccacctcttcccaacttcaccaggtaatttactgtgttacttgagcaccagagctgtattttgacttgtcaactgttatttaagcccttccttctctgtgatcattttcttttttttttttttttttttttttttgagacggagtctcactcttgttgcccaggctggagtgcaatggcatgatctgggctcactgcaacctccgcctcctgggttcaagtgattctcctgcctcagcctcccaagtagctgggattacaggcacgtacaaccatgcccagctaatttttgtatctttagtagagacaaggtttcaccatgttggccaggctggtcttgaactcctgacctccagtgatccgcccacctaggcctcccaaagtgctgggatgacaggcgtgaaccaccgcgcccgacctatgatcattttcagtatgaataaaatgaacatggaaataaagtattacatatttggagagctacttttccaaataccgtttttgacttttgaaaactgattttcagtgaccagtcggcagtttccagtcactgctgtagacatagactctagagtagtctcttcttctttttgttctgagacagtctcactctatcgcccaggctggagtgcaacaacggcacaatcttgctcactgcaacctccgccttctggattcaagcaatcctccagcctcagcctccggagtagctgggaccacaggtgcatgccaccacgtccaactaatttttgtagaggcagatttttaccatgttgcccaggctggttttgaactcctgggctcaagtgattcacttgcctcggcctcacaaagtgctaggattacaggcatgagcaaccacgtctggcctttttcagtcttttctaactcgtgcctcaggacaattaaaaagtctgacatccctctcaaaaaattctaccttcagtaggaggtgttgggctcatgccaaattataaatggtcaactttcaatgagattagggtgttagcacagtagccagatatgtgcacattttaaggtttctcctctgtgatagttaaggcaagtcaagactaaagaccttctgtctaggcagggagataggtggtaaatttaaaaagcagcccgccccttttatagtcttttcaagcctaggccacgcgagctagtgtagggagcgtcattgggatcatgacgtcatctttgaatttgggcacatgtctgcacatgtgtgcctgtcattccaggattgttttgccattgttcattagttgagttcacagctgcctctccagaaagatgacgatctaattataattgctcatgaatcaatgaagaaccaggaatgttttcctgtatcaacagatgcaaacaacacagacttctctctgttccttttgccctgcttgtaaagaagagtgaatctgaaagtggggcatccagggcactgtgttctggcgctctttaactccctctaaggccgtgatgctcctctttggggcctggcgttgtgcttttaggaagagctgcttctcccaccgtcctccctcctccaggcggtagggtgcaagggagctgcctcttttctaactgctctcttcactgattgtgtagtctctcctcctccatcttgtcctgtttgtaatcaccagctagatggctgtcccttaaatattaacttctaaattgtgctaacatgcaagtattaaggttctcctttcttgctagtacttggctcttagagattttgcttctccacatttcttcaagaatagacatctgaatggggtaacaactgtcacagagtagggtaacactgaacctgcatctgtggatatgcctggctgagcgtggtggctcacacctgtaatcccagcactttgggaggccaaagtaggaggatcacttgagcccaagagtttgatatatgcatttaattttggagggcggggttgcttgtttaattattatttcagaagtaatatatgttcatttcagaaaatttagaaaatagaaaaagaacaagataaaagggtgtttcatagccatattttttgtattacatatattcttgatttggctttgtttacaaaacgtgcaatataaaccagcatatcacctagaactgtttttccactcagtgtattacagcatctttccacgatacagtgcatattcttgttgtgactttgtctttaataacaacgtaatggtcagcccattgtctggttctatcatgacttatgtaattgatacatattatcaaatatttaattgtgggatgttgaactattcaaaattaccacattaatgatacgtaatcttatgtatattctgtgataaccatcttttgtggtttaatttttgcacacattcatgacatttttcttggacaggattctttttttaagagacagagtcttggccgggcgcggtggctcacgcctgtaatcccagcactttgggaggccgaggcgggcggatcacgaggtcaggagatcgagaccacggtgaaaccctgtctctactaaaaatacaaaaaaaaaaaaaaaaattagccgggtgcagtggcaggtgcctgtagtcccagctactcgggaggctgaggcagaagaatggcatgaacccaggaggcggagcttgcagtgagctgagatcgcaccactgcactccagcctgggcgacagagcgagactctgtctcaaaaaaaaaaaaagagagagtctcaatctctcacctctctcacctgggctggagtgtgattacagttcagtgctcctcgaacccctgggctcaagccgtccttctgcctcagccttccagagtgctaggattataggcatgagccactgcacctggtgcaaaattctcataatgcaaatatttaaggcttttgatatatactgataagtcatccctctggagaggctgtctgaagtggtgctcccacctaccatgtctggaagtttctattttattaccatccaaggtggtgaatgtcttatgattattgaccattggtatctgtaaatttcttgtttgatatttttttcggcgtgttcaccttctagtttttttgttttcgaaagaacccttgcgctggaaaggatggtaactgactctttgccttatttgcagcatacgctgccttttttgtgtgtggtgcttttttgagtctggagaggcttggcagccgctggttcagggtctctggttactgtgttgcccactggcatccgctgccacctcctctgtaacttggaaacagctttctgctgaaagcctggaagcccctcatcacacacatgcaggccctggccaggccagatgtccagcaacaggaaggtggagggagaagctgtggtgcatccacgagtgggaacactgctggcagcgagcagcaggcgcctcgcccacacgaagcacagctgttgacgctgagctcgggggacggagcaggcaaagatgtgcggacaggaaatggattggcagctgccaggggctgggggtcgaggggaatgcggagcttccttatggggtgatgagaagtcctaaaattgattgtgttgatggtcacacaactctgtgaacagactaaaaaccactgaatcgtacactttaaatgggtgaatttaatggcatatgagttatatatccataaagctgtttttaaaaagaaggttgacacaaaagtgtatgtatgatatggttccatttatatcaagttctaggacaggcaaaagtaatctatgataatagaagttaaacagttggggcggggcagattggctggagacggtgatagaaatgttctttgtgtttttagtggcgcttacttgggtatatgcagttgtcaaaactcatcaaactgggaaaaaatgcattctaatttaaaaaaaaaaacacatgggcacttatgtcttcccttttttttcttttgctacgatttgaaaaaggctatttttcttttctgtttttctcagttaatggttctaaagtgatttctttgctgggttatctccccttaactccctctccattgacaaggatcccagccagccctcaccccacccccaccagctagcagctccaccacacctgtggccagctcgccttgggaaaccacccatgccatcatcgtgcatatgatctaatggctttagagaactaggaacagagttattccccaacaaactgactgggaacctgttctgatgagtattttaatttgtgtgataaacaatcattttgagaggctggggtttgccatttccccttccaagaggaagtgcctttacgcatttgaaacttgacatgccatgaaggtatttttggagggcaggggacatttgggaagtcatgcagattacctaaggcaagtgatacttgcgtttatggtgcgtggggaatctgtaggcacagaaatgagactcagcagcagaggacagacagcacctgcctgccttctggtggaaactcagtggtgacgggagctttgctcattgcctttttcttgtgggggtaggagctggtcaggctcaccatcgagaagcagggacgtccgtctccgacgagccccgtgaagcccagttcccctgccagcaagcctgatgggtaggtgctgactaaccctcgtgtcgcgggtgtcacgctcagtggcaaagtctgcacttgacaaggatagggcccggtggggtgggcagcatgagggtgggctgctggaggcccatattcctttttcagtggttagcagtgtgtgtatatttcacacaggcttgaagtattgccctgtctcaagtttacccttcagcatgactgtttccaaggatcttctgtgagcgcgtccagtgacacataccagtgcttttcctgggcagcttcgtttcataatgacaaagaacttttaaaggcttgggtttgggtgctttgacttgagagcactcttgtttgatcaagagtaaactgaggatgacatggatggttgtaaaggtttatattcatctctactccaagctcctggtaaaaatataaaacataaatttggagcttttttttttgtttttgagacagagtctctgttgctcaggctggagtgcagtggtgcgatctgggctcattgcagcctcctcctctcagattagagcaattctcttgcctcagcctttcaagtagttgggactacaggtgcacgccaccatgcccagctaatttttgtatttttagtagagacagggtttcaccatcttggccaagctggtctcaaactcctaacctcaagtgatctgcccgccttgacctcccaaagtgctgggattataggtgtgagccactgcgcccggcctggagcattttagagaacccttagatcattttcagatgaggaaattgaggtgcaaagttgggggcacagccaagctccagtagctcattagcaaccaaaccagaaccccagggttctatatccagggagcctgctcttcagccccacctcacccactgtgttcttcctggtcacgtcctcaccctctcagggcctgtgtgtgctctgtcccgcctttgaccttctgtaaccccaagttcttcccaattctccagcccagcagagctccccctgacagaccgcgaggtagagatcctaaacaagacgactgggatgtcacagtcaactgagctcctcccagatgccacggatgaagaggtcgcgccccccaagcctcctctgcctggcattcgggtggttgataataggtaattaccttcctatttgtccagtgcctcccatggcagaatgagaaagaaagggaggaagacagggctcgggccctttcccctcagcgctgagggcttggccccccttgggaggctgactctggagctgtccccaccccgccggccctcgctggccaccctgagctctcctgaaggcctccttgtgccctcagcccagggagacatggtatgatttattatgaaagaaaaagaaagggttgttcttttttgttcatttggtatttacaggttttattttggcggaggggagtaggcaggagttgaagtgtgaacattgggtgtggagagtctagtaatgaaagaaccccacatcctgtaccccaatatcacgctgaagagctttggtgagtgtggtttggtctgcctggacgtttcggtctgtttcagtcctccaccagcattgccacccaagaaaagacagtcggcgccgtcccctacccgagtggctgtggtggcccccatgagccgagccaccagtggctccagtttgcctgttggaatcaataggcaggtaatgcagcccctgttccctgcatgggaaggcagggagggggtggggggctcagggatgtggctcctgaagctgaaagaaacccatggtcttcaggcgctggtgtttgtcacatcgaggagtgcgagaccttgtacccatccctctctctccaggacacggtccaagttcccatatggggataagggtcagggcagggagggcagagccaaagggcgtctcctggggataggtgagtccagccccagggccctccctggccacaccccccacaaactccagatggctgcttctcagctgtatgtgtccttcgactactgacgtcagaggtggtttctgagttcgcctggcagtatttccttctctaagtaaatgcaccggttgcctcacccctggtctgtgccaccgtttctcagaagtgatttggctttgtttttctttttccacttgaggattttgatgttgactgttacgcacagaggcgactgtcaggaggcagccactcatatggtggagagtcgccccgcctctccccctgcagcagcataggcaagctcagcaagtcagacgagcagctgtcctctctggacagggacagtgggcagtgctcccggaacacaagctgtgaaacactaggtgagccgccaccatcctcctgttccatcgtgtctcggtggcttctctggggccattacagtcctgggtgggagtcccaggtcatgcaatcattgactacgtggctttggctgacttgtttaaaatctgagcctcagcttcctcatctgcaaaatatggataacagtatctgcctcccaaggaagttgagcatgtaaatgaaatcacaatgtaaaaccacagcctagatattcaagcggtgactgttagttcatctgtcagtgagtaatttgactctctttaccaaaattaagagccatttgtgttgagagctttaaacaaaggggtgggggtcctgacaacacttgacagaggctgaaggggagggagccgcgcgagccggccttctcgttagtcagtgctgaatgtgtactgtgcgggcccctccgagtctgctgggcagggggcttagagagcaggaagctgttcgtatcctgtgaactagatattttcacttctgagaatgtatcctaggagcataatcagtgattaatagcaagattttcattggtaggaaatcagatgaattatggtacattcatttgctggaataatctgtagctattaaaaatcactcatattgataactagaaaaagtacaggaccatttacatagtattctcaattgtttctttttttttttttttttttttttttttgagacagagcctcactctgtcacccaggctggagtgtagtgacacgatctgggctcactgcaacctccgcctcccgggttcaagtgattctcctgcctcagcctcccaagcagctgggattacaggtgtgtgccaccacgcccggctaatttttttgtctttttaatagagacgggatttcaccatgttgaccaggctggtcttgaactcctgacctcaggtgatctgcccacctcagcctcccaaagtgggccagcgtgcccagccaatttttgtatttttagtagagacggggttttgccacattggccaggctggtattgaactcctggcctcaactgatcggcccgcctcggcctcacagagtgctgggattacaggcgtgagccaccgcgtggccctcagttaggctttttcaaaaaggaattgtataggcaaaaaagtcatttaaggaaatacttcaaaatgtaaatagaaagtacagttagattatggtactgtgggtgatttttattttcttgatgtaatttgccacggtttccgtaatggttgtgtattttttttttaaataagaaatgtaaaaaataaaagtatagcaaacagccatattcccatctggtttgcttttataatcagggagaagaatgaagaatataacatgtgaatataaaataagccctggagacaggtctttgtcacacacccatgagcgagccggcgagaggcgggcggggggagctggctgctcctgcagggcctgtggctaacgggtctctttttcccctgttgtaactgcagaccactatgatcccgactatgaattcctccagcaagacctctctaacgcagaccagatacctcagcagacggcctggaaccttagcccgttgccagagtctttgggggagtctgggtctccatttcttggccctcctttccagctgcctcttggcggccatccccagccagacggacctctggccccagggcagcagacagatacgccacctgctctccccgagaagaagcgcaggagcgcagcctcccagacggcggacggctctggctgcagggtgtcctacgagcggcatccctcgcagtatgacaacatctctggggaggacctgcagagcacagccccgatcccatccgtcccctacgcgccctttgctgctattctgccctttcagcatggaggttcctcagcccctgtcgaatttgtgggtgattttactgctcctgagtcaaccggtgacccagaaaaaccacctcctctaccagagaagaaaaacaaacacagtaagcctttgttgcactgttgtcaggaagtgcattttataacctgaaatggcagtatgttttatttcagcattagaccagaatcaaatcagtggcctcattatttcataaaagataggccagccaggtatgtggacacttctgggagccaggttttgtcattacacgtgatcatttttaaagcctcatcagctgacctctcctttacagtttctatacaatctcaggtccggtctccatgtagcctgagggattctcctctttagatggcagcagttgaccttctggcctgatcacagtgacagaggggaacgagtgtcctggcacgcaggacagcattgcagcaacatctgtgtagagcgaggtggatacgtgaatttcagcagaacttgcctagtttccacagagtgattgtctaaggatccctgtctagagcacactgtctctgttcatgctcccagaatgacttggaagctggggttgcccagcaggagtaattcagcacacttcttggaccagacattttaatatatgatgttattggagcccagggttggagctgaagttttgaatattttccaacggtaaatctgtcataaaagtaataaggagagttctcctggaaattcggttttctcctagctcccctaactgctccacacttctgggacttgcctggccccctctgtccccgccctctccctgcttcactagcatagttctgcttcgattttcttggcagcacagctgtcaccgtttcaatgtgtgtggtcacattagccacacagccccaggcttccctggcctcagttgacacatccagcagagaacttctatgacctagaaatggaatctctactccaaattcccaaatgagagcttctgagcccagcttagagctgggccccattctcaaagaagggaagacctggcttggttcagtccagcaaggatcgccctgagggctggctgcgtggtccacagaaggcagcggctgcgatgatgtcatgtatccccagctcctcagtgggtgttgcccagcttgtgtgatggcctcagcagtgtggtcccccagctagagggagagctggctctgtgggactaatgatgtcatccccatctgtcgtgtatatttgctcatcagaaaccagggctcccgcagaggggtgtgcaatggcactgccagaagcatttccttctcttcccctccctctgcatggacaagtgtttaaagagctgttggcctccccctccacccctgttatcttgggctgcgtgccattcaggttcaccccctttccttccctaggggaggggtcctctgagctcagacactgggcaggatggcatccttgcaagctgcagcagatgccagagagccttacccttccagctcctagaacaagtgtgggcggcggtcctcatgcagggtctatagaggggagaaggaaagggaggggtagccattgtttcctttcaaacagtctcaagtggctgaaaatccctattaatttaggccaccattttgaggctttaaccaattcatcactgtctccagcactggagcctgcaaacctctaaaaaactcctgagctacagccatggtgtgccctgagctaaagcttcacatgccctatggaaggtagtcctgacagccacctgcaaggcaggctctattacctccaatttcataggtagagaaactggagctcagaagaactgagtattgcccaagatcaacaagcaagtggggcacagatctgggactgagagcctggcctgagttgtacaagcctgttacacttcctcccaagccgaggaggaagagattcagccctccttccttgagatcccatccagtttacagtattgacccctgtgcaggggttggtcttctccgtaccctgtgaaagagccccaaacttaggcaccctgagcctcatccttgtccccagtctgctgttcactccccgaggggaccctcaggtgaccttgtggaaaatgcctcaaaattgctttgagggaaagaaggaaagaatcatcaccctggccgcgtggctaacgctggcctgagttcatgcacgctcagtcccaatgtcacgacgtgtcctcatcatttgggatgcactgacatcgtgagggtccccagcccctcttgcccggagcagccccatgagtcccttgtgccagacgagccttgtgatcactgtccggcacctgaaatccccacagtcccaggccctgagcactggcggctgaaccttcccagcaatgctggctgtgttaggagcaaggcctctaaaatcagcctctgggctgcttttgaaatggactgggtcctcctcatttctagaaggctgggagcatcactgctgttctgtgcttggctagcaggtgtctacaaggacttcaacatcaagagttcagaaagacctcctgaagagatcacagttttacagaaaagtcaggcagagatggttgtgtttaatctttttcttttttccatagctcactgcaaccttgaactcctgggttcaagggatccccccacctcagcctcttgaatagctgggaccataggcacataccaccattgctaatttttttcttttcttttttctttttagagacgggggtctcactatgttgcccaggctggtgttgaactagcctcaagtgaccctcctccctcagcctcccaaagcactgggattgtaggcatgagccagtgcgcccggtcatatttagtctttttagggagcagtttgtgggtgcttgggatcaccttcctaggcttgcctcttcgtctggagcctggtgacattggttgtgcagcattaaagaggaagtgtggggctgggcttggtggctcacacctgtaatcccagcactttgggaggacgagccaggtggattacctgagttcaggagttcaagaccagccagaccaacatggcaaaaccccatctctactaaaaatacaaaaattagctggacacggtggtgcatgcctataatcccagctactcagtagactgaggcaggaggatcgcttgaacccatgaggtggaggttgcagtgagccgagattgcaccactacactccagcctgggcaacaagagcgaaactctgtctcaaaaaaaaaaaaaggaagtgtgagacaagctcaaggggctgtgagctgccctttcagtagcagcagctgacctcagaggggaaccatttcttcctgtgcatcttttacaaccaagttctgctcggtgcttgttggagctagtaagaaattcttacatattcttttaaataaagaaggtgactttgaacactttccttcagtgacactcctggagagagagcatttcctctatacctggacccccagtgtggctcagggaagaaataaactccctacctctgtgactgtcttcctcagctcagtgtctggccttccttgatttgttgactagttggggtttgcagagaagcctctggctttgtgcttatttgaagatacaaaatttagcactgcagagccaccactttttcttggcatctgaatctcagctccacctggcagctgctcgtggcacttgcgacatgcctcgaggggaaagtgcctgctcaggaggtagctgagacttgccatccctgcacccgccatgtgccctcgcttgagtccccagttcacattagggttccccattggtgttgcgcgtctgccggtctggacgtgtctcctccgttagcgcatcagacagagtgtgatttcattgcccgaaaagtcctccgtgctccgtctgttcgtccctctctgaggtgctttcagtggaaagccccctagctgctgtgggaagaattgggggaggggttccctgatgtggcctcccccggcctcgctgcagctttctcccttgtttcacagtgctggcctacatgcagttgctggaggactactcggagccgcagccctctatgttctaccagacgccacagaacgagcacatctaccagcagaagaacaagctcctcatggaggtatacggcttcagcgactccttcagtggggtggactccgtgcaggagctggccccgccgcccgccctaccccccaagcagcggcagctggtgagtgacaccttcccttgtgactagaacttccgatcctagcaggtctctaggaaccagaatgaccctccttgggggcagggttaaccctcctccctgctgtggcagggccctggttttgggcgtggaaggcaccatctcccacacagatgcttttacttcctccttagatgctcaccagcagcccagcgcccactccaccacctccccaccctggggtgcagggacctttcttttccacagcagccccgcgcagcagggacaggcttgtactcagggtgtttgctctctctgctgacagtctcttgtatttttttctttcttctttggcttcaacatagacctcccagaaaggagggactcaatcaaagcacaggacatggtctgtgcacagccatctgtggacttgattggcataatgggcctaactgtgtagagtgacttacaacccagccttggccggggagggcccaaggaaaacaagtgccattgaagtggaggatggctttaaacagagccactctgtttcagacatggcaccttcctcttctagaaaacactcgtgtgctaaggactcctgtgcatgtaaggaagcacgggccagcacagaaggcaagctgttccaccgtgggcaccccatgaggctctggaactgcccaggcactgggagggtgagcagatcgggggtacctgtggcatccctccaaactttctccctttgctgccagttaatgaacatggagggccctagtcaggtttgaagatctgagcctcttgtccagccatgctccccaggaagaggaagctccccagcagggagctccaggcttgttcagagctgcctgggctgctgctctcgtgtgctggccagtctggtggcttctaccaggaggcgactggtgtgcactgggccatcttttatccattgcgagaggacatgaggggccatctgattcttctgggaggcagctgcagactggaggacaaatgtccctggattactccgtataatcaatcacctggggctcagcccagtcccaggagttcctgagccttcctatactcagtgggctgtggctaaccaagcaagctgttttgtttccactcaaaaaccacactcagccacttcagaggtggccatgtccagtagaggaaaggccaagcttggagttgggagtcctgaattccagtcctgccacttgttagccgtgtcacacgtgccattttcagagtctcagatcctcacctgccctgcccgtcccacagacacaattgagaatgtgaatctcaattgctctgaagatgtttcaaaaagggtcccaccatggaaacataaatgcctcatttagagaccccttgcctaaaatgtttggttagaactgttgccgagagccaggagtggtggtggcacatgcctatattcccagctacttgggaggctgaggtggaggatcacttgatcccaggagttcaagaccagcctggacaacatagtgagaccctgtctaaaaaaaaaaaaagccattgctgagccagatttattgaaaatattttcggcccatttgccatccttgggcatcttctccatactgtggagtccacaggcttctgaatatttggggagacacccctagggagcacgtggaatcagaacctgttctaccacgcctgcagggcagtggcgagctcagcccccggaggcctgttaggaacatctgtgttgaacacctccccaggtaagcaccagggctctcatctggctctacatggtccctgccacagctcctggcatccccattataagtaaattgaggcagacagagccagcgaaccttaatccaagcccacagctagaaacagaagacctgggagccacacccaatcctaatgacagcccaggcataccacctgacaggtcctgccagctgctggtcacaccctctctcaaatgcagatgcaggaagcgttatccacacttcacagacaaaaatggtgctcattacacacacctgttggcccatgtacagtgtggtaagcaatatttcaagtgcttcacacgtatcatcccatttcatcctcccaacagccctgtacaggagacactagggttatccccattttacagatggaaaacctgaggcacggagacctttaagtagtgcccaaggccaaacgggtgagaaatggcagggtccagactcaaacccaggctgccggagccccgtctgagttctgaagacgtgtgaatgacacatggatccactccccacagaggagcagctccaagcccagagtcagcccagttctgtgtggctccagccccctcgtcctccttccacccaacctgcttccagtggacacaatttttaggatctagtgtaaggaaatgaaggagggtgccctttcatgcagatggccttcggcagctggttttagtccctgaactgggcccagaagccatccctctccagaacgtctgttagaggatgtggagagcaacctccacggcctttccctgcacggacctgactgttctctgcttctctccctccttccctgccttctctctcctcccctctgtccagcaggcctcctgtgctgcttcttccttctcctctgtctcccactgtgtccagcaaactaaagtggccttcacccccgaggacggcagtgccgctcagggcctcagtgtgtccgtctctaactcctttctcagccggcacggcagcttgcccgtgccctcggtgagttgctccctgctgttctttacttggaaacgcgtgaacagggccgttccttggaagcgtgtgcctcagccatgtgttctgctgcccgtcgcggcccctgcccttctgcgggtccctacacctagatgggaaggctatgaatggttggttctctggggccttaaagaccatgaggcatccaggtgaggcaggggcaggcatgggaaatgtgagtggccaccttgggagcatcaccagtctggcataaactgacagagacattttagcctttttatcccaatctcgctttggaccttggatcagccctctgtgttccaggattaaaaaggaatatagccaggtgtggtgtcactcacctgtagtccccactcctcaggaggctgagacaggaggatcacctgaactccagagttcaagtccagcctgggcaacatagtgaaaccctgtctcaaaataaatagataagatagatgagatggatgagtagatgggtggtactattcctcacgtagaaagccaggtcgaggagagcaggcttcactagcgcaggatggtttgactctcagggatgtattagtttgcttttgctgcataacaaaccacccaaaacttggtggcttaaaataatagtgagcatttgtcactgcttaggacacggggtagcaggatgggtgtgctgctctggcccaggcttggccaattttggctgaactcactgacatccctgggacctgagctgagacaatggggctgatttggctgtgacccatgtagtctgtcacttccatcaggctggcctgggcttgttcacatgacagctggcgggcttccaaaaataacaaatggaagcgtgcaaggccccttagggcctcagctcagaagtagtgtgatgcctgttccattgcatttgctcagttaaattacaaggccagcccagattcagggagcagggaagttgcttctgcctcttgatggtagttgctactaagtcatgttgcacggggcatgggtccaggaagggaatgggctgcagccatttgggtaaacagtttactgctgaagcctaggggctgacactgaagaggggagtctttcactggcatctgcgcatgtccaggaaccaaaatggccaccattctccctttcgtctgttaaaatgaaacttagcacaggggaaagaactctagaacaatttcgagtcccacttgaaagaagtttggccttgggcagtgcaattctccccccatggccccccgccaaagatgcttcagcgtctttcctttgggactggattttacttgcctcatattttgtaagtgtgaaaattaagtaaaattatatgaaatgtctaggtatgtagtaagcttagaaagcttattactgttcttgctctcattgtcttagtaataagagttctggattctagtcttgttctgtttctaactttacacatgagagttaacctgtttggccttttttccccctctgtaaatgatgagtttggaccgagtgacttttaaagacttatccaaactcaagttcccagtttggtcttgtctggtttccatctgtgcccagggtgggcagtccaatgcccagtgccttcgaccaagatggtcctgcctgtctgaggaccttggagtgcattctcccaatgggtactgaggcctcacgccttagagcccccagcatccctactcatgctgggaagatgcgctcccctcaccctgctgtggccacacagaagcccctggtttcctcagaggcacctctggcaagctcctttcacaaatcttgcgaaacttggcctttagacaatccgagctcttgactgagctagatttttgtttttgttttctttccccttagagtttccacaatatcccttttgagcagttagggttagaggactatgaatgaactggactgttcgctacaaaattaaattcgaggacattttaattaagtttggttatgagtacgtcatagtttttatccctgggacatacaagagccttaagacatcttgtgtctaaaacactgcattcttagcaaaaagcccaccaaggagcctgagggaaggaccttataaggtccttatgtcattaaaaggagaatacctcaggaaccattagtaatggccaggtttgggacattcagcacccagtatgccggaacctcagagaagggattcagtacagtgccaacatgtccttcatatatcctttggttaaattctgagatgagccccagacatagagctttggattactatcagagcggccctttattcctgactttcttcattcattgctcctgggcctgtgtggtttgtccagcatggaactctgaaggagtgccccttggaaacacagcagttgacaaatctgaagacacctcacgtggttcttggcacagtggacgattatttccactaaaagattctaaccattgaaaacctcttgccaagggaatttgtagggcactaaacctgtgtggaacaatttaaatggaggtggatactgagaagtattctcattcactccttccctgataccagggatgggtttaattcagcaagctcaggacatcaacttttccaggccgggttgcaaaagacatgcagttgaggaggatggccccgagcaaagcagggccacaggtcagcaggctgaggaagacgggcatgaagcctgcgcagaaccaaagaacatctgcacacatattaattaattttgggtctgagtgcgtcatggcttttggttttttgtttttgtttttgagatggagtcttgctctgttgcccagactggagttcagtggcacgatctcggctcactgcaacctccgcctcccaggttcaagcgttctcctgcctcagcctccggagtagctgggattacagccgccctccacaacgcccagctaattttttgtatttttagtagagatggggtttcaccacgttggccaggctggtctcaaactcctgacctcaggtgatctgcccacctcggcctcccaaagtgctgggattacaggcgtgagccactgcgcctggccacgtcatggtttttatccctggaatatatgggagtcttaagataccttgtatgtaacatacaagttcacaccacatgaaagcacgtgtgaggaatgacatgagagttgtaggcatagaaaccttgtgggtggcggagcaaggacagggtcgtgggggctgggggtggagcttgaactgtgacttgaagggcagtcgggatttttaggagctaaaggacagggaaagcaagtcaagatgttccaaacagaaggacctgccagaggcatggaggccaggaagcccagcatccattcgggaaggtcatctcaaatgtaaacacttagaataaggtaatgaggggaatgatgacagccagccctcccgtctccccagaacctccactccaggaaaagccagtcctccccatccgcaggctctgccgggcctggactcgactgtttgctgggcttctctctcaccagcacctcccacgagttggtcccagggagtccctccaaccgtcccctgcacaggcttcagaccgagagatgcagaatctctcagtaaccattagggctgcctgtgccctgccggtgctgcagggttggcattggaaaaaacaccttcctccggctgggtgcagtggctcacgcctgcaatcccagcactttgggaggccaaggtgggcggatcacgaggtcaggaaatcaagaccatcccggctaagacggtgaaaccccggctctactgaaaatacaaaaaaaattagccaggcatggtggcgggcgcctgtagtcccagctacttgggaggctgaggaaggagaatggcgtgaacccaggaggcggagcttgcggtgagtggagatcgcgccactgcgctccagcctgggcaacagagcaagactccgtctcaaaaaagaaaaaacaccttcctccatactgcacactactttcttgtacgttctttctttgctaactgaaagttatgggtatttactctcactaagagatctatttgggtgctagaaatctgttgaaatatttctttaccatcttggcttccagaatgaatctggataattaaaactgctagcagacccaagttgtgagtagaagttatattgaaatgcctgtaataactgtcatctgtttaaaaaaaaaaaaaaaacttcaggctaagagagttaagtgtgtatcatcttgaggactttaatttttttaaaagggtctgcagagcagctggcatcccattctgggcaaaacagtcgttttctgagatgggcccaggtttctgtgcatcagcacatgtgctctcaacagaaggcttgagcttcatgcagacgctcagtccccatgccatggcgtcccctcgctgggaaatgccaggcccagcccctcgggacctgttgcaggctccttcactctgcccattcatctgcctctcactcactcactctttctctccttccctacccacaacctcctggccacaaaccatccccaaggatgagccatcacagaaaccatgggcacactgacgggcctaaaggccaaacaggaaaggggagagatagagagagaaggagagaagaagggaggagaggaggaggaaaacggaatggcccacgggagggaagtggaagacagtccatggggctctcggcacctgttggaaaaaataagttcctgccatcctgacctttgtcctttgttcctccctgatgccatcttgtctcattggctttttgtcctggtcagagctagatcacattgagagagagagcagggagcatctgtgggcagaacccggtagccgggggtgggagaggggtttctcaaggcagcccctccttggggggggggtgttggtgcacacactggtctgaccctccctttgcacggtccacatggagtgctcctctttggggaaaaggactgtgccgctgtccccatgttgtgaagcccccttgaggcctctccctcccactggtgcatgttcctccttggcctggcgtagctcacgtagtacgtaggtgcttcaggttatttcacaccgttgactcctggactgtcctccattcttgggggtttagcagcacaatgtagtctacaagtctataccctcaagggtgtggtctaccagtctgtgcccttagggttagcatctaccagtccatacccttaggggcagagtctacaagttcataccctttgaggcagaatctacaagtccaaggttgagtctccacagatctccagctgtttgagtgcaggcttctctcctcaccagaccctgggctccctgaggtcagaaattagtccccatgcctggcacatagcagacaggcaggcagtgcccattcactcttgtcctgcccctcttgtcccaatcccaccatgtcttgctgatactgcacagggcattagccttgagcgggtccgcttctctccagcccgtggccactcacttcctccccacccccatgtctcacctggatgcactgcagctcctgactggccttcctgcctctgcagtcagaggccctccctgcttctcaaccctgcagctagactatagtgtcgccacatccctgcagaaccagggccagcttccctggctcttcagaggccctcacactgcttctccccaccttaccacgaacctgtcccctgcacacctccactgccttcccttcatcccttcccaacatacgagtttctccttcctgcacaaccctgtcttctccccaccgtgttttctccttacttgctgtatgaacctgagcacaccgccctgccccagtgccctgggccccgctttcctctgtgcagtgggagcacaaggttgttacaaggatgaaaagcacacatgtagtacgtgacgcacaaccagcatttcatggaaagggagctattagcatcagatctgtcgccatgtgggggaggctgctgctttcctgtgtcatgttccggttcgtcttctcaggattgcatgtcccctgaggagaggggatgggctgtgaactggcagctttggtgcagcctagcctctagctcccatgtaacagatgcattggtcccaggctctggccaagaatccattttcttcctcattttccttccctactgacctgaggctctggctgctgtgtctgactcaagagtttcccaggtagttcctgtctgcagagcccttgaaacacagtttggctcctgcagtgcgttccccctgtgcttttccactcttcctaaaagacccagtgctgctctgaagtgtgaaggctggattagatcccactcagcttgacctggtcttgtggaaggaggtacatgcagaccagagccccttccaggtcactgcgaccctcgggataacgtagagccacctatagagaaaggcccagctctggaggagacggcgttacctcctgagcccaggagcgagcctgccttgccttactgtgggcagtagggagtatgcccatctcagcagcaggactggtcacagccttgacagcaggaacagagctgagagtgcctcgcattgggggctttcaaaagcaaccactctgatgcagctgtttccaacccctggttgtagactttgagaatctttattgtttacagcctggcattttggctgatcggtgccccttgaccagcttcaggcacagtagtgtcactgtagcacctggccgtggttgtacttctgactccatccatgacaggcaaactgtcatgtgggagttcagtcagggtggtggggaaaattacagaggagaagttttaagataaagttataggaaatagacacaaaccttcttggaaggctggtacccacaggatccccattccttgtaaaggtcgtgcactgacacgcatcctgagggccagttccacgtccagtgcctctcgcctttacttccacgtcaggctactgtttccctatcgagggccttccttcctattctgtgatcaaatggttcactgcagttctagagatggagaagccaggagagagaagctgagccatttgttccaagttaagctagagccagggttggaatccagaaccctatcatgaaaaatacagcgttagattaacatttttgaactgcttaattgcccatttttgaactgcttaattgccaaataaattttgagatctcgtaaggctgggtcaaaagaaaagtgtgtaggctggacgttgagaggcgtgtatttctccttcatgttctgacatgttacaaagtgtagctacaggctctaaatagagttctaagaataagtataaattagagcccctgtcaggctgttgaaatgcaaactgagtaaaaatagttgtcagacttctagaactgaatttgaatcatttttcagtctgtactaaatctttctataaagggttgatgctattcagatcaacacttagtgaattacagagcatcctagaatgtattggaggttttgcaagagttaatttgccatgaagccattggccaaaacgtagtattttcagtggagatattgtgattccagttgcaaaaatacatcacatgagaaggaacttaataaggaacttttgcattcacccatcttctcccaagcaacgcatttttgttcttttacatccttttttcttaggatattcaggtggtttttaaaaataagctccactaaggagtttatttgaaaagggagaagatattttttggacccaacataatgctaatgttgcctttctttggtgagaagaatgccatcttgtcattcacacagtgtgacccacaggactgccttcttaccaggatcaaagacaaaacggtcagtggcagatctcagttcatgtgcatgtggcattggcctcagaacctaccacttggctttggaactcatcttttgacattatgtaaggtatagttattgttttaaattaacacaagggcatcaaggaaaaggagttgcccctgggcctaaggtagaccctactgtgtaaaccagtagttaattgggaccgtaaggaaagagaagacaaagccagaggtatccctaatagtttgccaaatggagtaacaaggagtgttaccaagcacctttcctggggcaggagggtgtcctgggagtggtcataccccatctctataagaatcaaatcagataagcttttctccccagacaatcacgtgggtgtcatcatcagtgaaaagctcaatttccttccagaatagataaattagggcccacactttgaggctcacagtcccctagttgaaggacatatgtgctctgagcccagcgccagtgctgagctgtggctcccattgattctccgctgaggaaggaagcccagaccacactagaaaagcagcttcccctgaatgtgttttctcacaaatgagggataaaaatttaagcccgaaaaccagctgtccaatagcttatctgttttgctaagtagcatccaaaaactctgaagtcataagccttacttgagccaagattatgcagtaatgaccaatttctggcaacttctcttcccaaacacttcaccatgccagtgaatccattcatttacatgaccacatttcgctgtaactggtggagctgacaattctccagggcttggagctcaagtcactgtggagcaaccattctgatcaaggttcctcagcctgtgtccctaaccctcagccgctgatgagcagacagcctcctctggcacgcgctcttcctgatcagcagaggaattaagtggagtggctgttatattgaggactcagaattgttcctttaaagatctgctttcctgctgggcacgatggctcacgcctataatcacagcactttgggaggctgaggtaggaggatcacttgagcccaggagttcaagaccagcctgagcaacacagcaaaacgctatctctacaaaatccaaaaaatcagttgtacctggcgacacatgcctatattcccccctatttgagaggctgaggcaggagaatcagttgaacccaggaggttgaggctacagtgagccaagaccgcatcactgcactccaacctgggtgacagagcgagaccctgtctcaaaaaaagaaaggaagaaaaagatctttcctgctttcttgctaaggcaacacagagcccatccctaatcctttttccatgccaggactataatagagagaaggtgtcaccgaaaactagtgccttttctaagtattttacttgtgagaaaaaaaactggtgcctggccagcttcaggcagctttgccttttaatgaattggccacacgctcgcatatgaggtcatcagcctccagcatcgtttcgactccggggcccagtggctttcaggggtgtgtttccaaaggagctggttactgattccaccttttccctgcctgtcctgccacactctggccagtgcacccctctctccatcctggcttatggatcaagtctcagctcactgggctttgcatgcctggtgtcacaaagcactcagctaaggaactctgcagatttggtgaggctgtaccctgcagagctgtgggattgcatggttagggcctgtctcgtccaggatacacctcagtatttcagaaaacacgaactgattgtgatatcagccatacccacgccacctcttgccagctgtgttattaggcacgtggtctcccctcccagcctcagtattttcatcagtaataagaacagtaaggcactgtgtgtacgttaattgagatgatccgtgcaacacttacatctgcctagcaggaagcatgaggtaggaatagttgttctcgtcctcatgaggcagtccctgctgtgtttcgactggctatgtgaccagggctgacattgggggccaggcacccctctcctaactggcacccctagatcttgtgcagaagtttgcaagtctcagacaggcagcccttcccgttctaaaatcctcagcccaaacagtcttattctggctataaataaaagttcctgctgcacagagagcagcagctcgtcagaagcaaacccgggcacgagccagatcctaaaataaactccaggctgtgatgaggcggcgtttctgtggaatggcccgccctgcctttctctctgcccctgtgggtaagcgtgatcataaggggctggaagtattgctctggggaatcggtagagatgggggcctgttgtaaatggtgtgaccatgagccctgatgcagctcctggcatctgcagagcccaaggggcacagcaagggcttcatggtgatcagaaggttttccctgtgtctccctgccccgtgaaggtacctttccagtttggctcttgtcccagcacgactgcatagcttgaataccagaacgtgagctcacagctgcagaggcagaggcagagcaggccaggcccctttgtccaagagaggccgactctccttgctttctccttgctagctgccccctccttggcagcccacacccctggtcatttccctgagcctccctccccagtgtctggacctgaacccatgcagtgggtgaagttcgtctcttacccatccacactcaaaactgagacgctgctgtgagtcaggtaatattctagacaccttaattaatacagtgcctagactatgtattaggtgcctactaaaatacgtatcagcaaatatgtattaggcccctactgaatgccccagtactgttatttagggcagttcctggattgttgggagggcaggagaggacggctgctgctggccgagaggtcgtccgcaccagcaccatgcggaggacttgcacgcagcgctctgcgtctcgcggaacgtcgcagaaaccttatgggggaggggctattgttttcatccccgttttaaagatgaacagcttgagctgaggctcaagaacttcagtcacttgtactagggcacacaagcggagatgccatgaggggcaactggagaccttgcagtcagccgctgccctgtgccgtctcccggaagaggcaccatgctgtgggagtctgcccctcaccttgttgaattaaaaccggctaaacacactatatgattggttaggaagacacttctccaacttggtacattttgtgatgacacaaaagccatttgtgtatgtgtaaatcaggtgctcagttattgcagggcacgtggaagcacaaagtgactttacacgggggcgccgatgaggctatttcaagactccagaaggagtcagcgcggaacatgactccttaaactaggcagcagcaaggcaaggtgagggggatctgtttagcaaatctcgtggcagtgtctgggcattgggaatgaacatctggcagatctgagaattggggctacaaaagattgagccactccctgaaacagtcatacaagggttccctgaaggcagcccccccagcagcacgccgtcccacccctcagccagtgcatcctgcttgctgtcttctctgtggactttcccagccagtaagggaggcttgctgtgtgcaggcatcctccagagatcgatggaaaacccagaaagccaagcccttcaccccactgccatcccaggaaggcccagagcgagctcccaggcctgcagcgccatcctgggtaattgctgtgaaacgttgaagtgttgcgtggagcctgctgtgagggtgtaggtgagggcggcaagccagggtgtaccaagcagggtgtctgccccccgagctcctgaaagaaggatatgaagggaacttcacttgtacaggtacctgagtgttcagtgctggtcacatgtatgacacttccactgatttatttgaccatggcatagggttggccttgagtttgtaggttagatgggaaagcagatgtgtaagtggtagtgagtgcttagggcagatgtcatggatctggtgtgagatcacaggagtgagatgagggaggagcttgaaactctggtcagtgcagccgggaaggggccacggctgtacacacaggtggaaacgagagggttgcgttgtccctcgagttacggtagctctttgtacaggttaaagggtagctttgccagactgcttaagggccaggaatggtggctgatccctgtaatcccagcactttgggagactgaggcgggcagatcatttgagctcaggagttcaagaccagcctgggcaacatagaaagaccccgtttctacaaaaaaatcaaaaagtgagccggttgtggtgacatgcacctgtggtcccagctactcaggaacccgaggtgggaggattgtttaagcccaggaggtcgaggctgcagtgagcctgggtgacagagtgagaccctgtctcaaaagagaaaacaaaaaactacttaaggatgagtggctttgacctcttgttagtttaaaacttcatttttcttcctcttcttcctcttttccatgggttctgaaaatccccagccacagcaaacacagagaatgtttgagcgagtggcacgcacatttgcactgggcttgactttcctcacgtccctgcctctgtagtgggccagtgagcccggcaaggtctttgttttgtttaattttgtgactcattcattcacccatatctgcaaggactttggacgtggccacccccacagcgctctcccagctccccatgatggtagcagcatgatggcaggcctttgtaggacacgatgacatcacatcattagattctctccacgtggtggctgctgaccaggtcctggaacacctctgtccctccttcagcagcagagccccagccgggggtgctcactggaccccagaagccatgggatttgctgtcacttctcaacacagtgtctttcctctctgatgagcatctgggggagtatagccttgtggctacaaggtggcatcaaagctgttgtaagatcacatttgtttttatttgagacaggaccttgctttgtcacccagcctggagtacagtgacttgatcttgcctcactgcaacctctgccttctgggctcaagtgatcctcccatctcagcctccagagcagctaaaactgcaggcactcaccaccacccccagctcatttttgtattttttgtagagatggggttttgccatgttgcccaggctggcctcaaactcctgggctcaagcaatccacctgccttggcctcccaaagagctgagactgcaggtgtgagccaccatgcccagcctacttcatttgttaaaaaaaaaaaaaaagaaagaaagaaagaaaaaaatggggtaggaagagaaatggactcagacatcgttagcatttccatagtgcagcttgccagccacgcttaaggtttgtgccgctcctttccaaaagcattcaaggtggatttcaatgtttaaaagttgcagtgtttgactcttaaggaataaaacctgagagattcatccagaaattcaaaatgagtaattacaatgacattgaatttggccacgaagttcctgagcagacaagacagcgatgggccacgcaggttttattttctgtcccagcagagcatgtggccacttgagccgttctctgtgtcatgctgtttagatagccctgaggacagcgctgttcactctccagtctcagggcccttctcaagggaggaggtgctgggtgtgggtatcacagtggcctgaggactgggggttgcttggcgtgattggtggcccgttagactaagttattgtgaacggcctgtcactgctcagctactgccaatctaattactttttctcttttcttcttgtattctcgtttttgtttgttctccacctggattctgtagtataagtctgtgtttaggtcctactcccaggatttcgtgcctcaccaccaagcttccgttccgcctttccttccgcctacctcctcttcctctccacatttcccacctgcccaccagtctcagagctctgacttagccgtgccaaccatggccggtccacctcccagcaccgtggacgggcctctctcggcttctcaggagagcagctttcatgggaatactgtctgccttccttccgaaacctctttcactgactcggtgagaactcagcgtgcacacacacacacacacacacacacacacccctgcacatggggctgcacgttttttaaaaagcggtttcacgttcctgaaagacactgcctcccctttactagcagttgggggctgccagcgcacacctgctggcagcatggctgagctgacagctactgagggtcacaaggtgcaatgggagcccatgtgtttccagaacagaactgactcttctatacaaagttctatcaaactaggaatctgattttccacaaatggattagtggccatttagagaggaacttatcagacgcataagatacaaaatgctactagctttccatttacttgtctgtttttagggaaaggtacaaagccctttgcaagtgtggaggtgacagattcaggacaagtgtctgtttggttgcatgtggtgccgatgacagaagcctggtctctagcctgttaaagtgcctgtagcgcttcgtccaactcagagaaatgctgccttgcagattggagcagacaagtacatggggcagaggaagtgcaggcagcggaccccactccccagtatgtgggattgtcttgatgtgttgcttctctccctccataatcgtttcccgccacactggggacccctgctgtctccactacagtggggccatctctccaggatgatttagccccagacaccattggaggggcagcagcaggagacttggatcccctctagcacagaggcaagaggtggcaaaagcagctttgctctctgcacctgggaagaccagagtgcaggctgtggcatcccctggccagctgtgagggccggctggagggcctggcccatgtgtctttcctctcgtcctgtctcccccagagtgaaaacgccagtgaggaagctggtgagggtgaatatgtcaatctgtattcctctggccagagcagcgaggagctggctccctctcgaggagtaagtaacctcgggcggcctcctgcatgtggcctggcctggtggggcttgggccctgccctcccgaggccgcttcccccgcacctgcttctgttgggctgagccccctcctagtcaccagcagactgggctcctgcaggctgctgggagccagctcggccctttggagaggacgtggcttccaggtggaggtctgccctttgctcctgcttcagtgcgtgtggcactcctcagagcctggccagatgggtcatctagaaatctctgggaccagcgtggcacgggccccggctgtgtatctagtgctctctgtggggttccttcctccctcatcttctggtgttggcttcatcttctgtccctcatgcagagggagggactcttcttcccatagggcctttcagaccttcatctccctccccagcatgtcccattgctccaacactgactgcttctgaggaagcgggtgagtctggcccatagcccctgccatgactatgcacaccccctcctgagggagccacaaggtacccgacgtcagcaccctcgtgatgctgctgccccagctcccgaccatcgcggtacagcagttctattgagcaatccactttccacattttgcttcagccaaacatgagcaagttcaaaagcttcagaaattgctccccccatgagcccaggtgggacaggttccttgaagggaggcccatgagggctggaagactcccagtgatccaccccagggcgggcccccacccgtgaagagcttggtcacacccgttcaggtggttctctcagcagggtccccacaggggttcagaggcccacccagagccagccctgtttcagacattagcaggttatagaacattgaagagtgtccactccagtgggatttgacccagtccatgggagctgtctcctctgctgacatgtgcatctggcaccccccggctcagcctccccatggtgaagtccacgtgcaggtagaggccagcttcgcatggctctctccctccactgtgacacttccagggctcactggctccttgccttgaagcactctttctgtatttgtcctgccccagttctccatcaggctcagcagcagaccagggatgttggcgggccatgttgtcactgagtagggccagcccagggacccaggaggaagcaagtctgccggaggaagaggggactggcaccccagggcctgagagctggccctttggggactgaacccggttgagcactgcagccctgaggacttctttaaatcagcagagtttggttcacgacagcagggcccagtggttaagggcacaggctttgcaggtagatagccctgggttcaaatccaagctctgctgtttatgagctgtgtggtcttgagcagggtccttgacttctggcctctgtttctatgcatggagtggggacgatggtgttagctcactgacgaagtcaaatgaggagaagtgggcacagcctagagcccagtccctggctgtgctcggggggagtggctatgacagtcttctttgaggaggtagttgaggtggctttgcctaggttggcagcttacagatgagacaaatagtggcacctttcactttctccaaaggccacatgctagtcttgagggcttgtgtttcctgtgattaacggcattcatctttaatttgttcacatctgagattgctccataggaacttgcactccacagccacttgcaggcaggaatgctgggaagacagagcagccccgcggagggcccctgtccagaactcagcacccactcctctttccaggagccaccggctgggaaagacggacatcccagagatccctcagcggtcagcggcgtccctgggaaggacagcagagacggcagtgagaggtaggaagtggacccagaggagctgggtcccccgagagcagtgcgcccactcatgaggcctgcctgagcagcctctcccagctagcccctaggcctgagggtatttcaagttgaaactcttccttctttccttatttcctttttttgttttttagagacagggtattgatctgttacccagactggagtgcagtggcacaattgcagctcactataaccttgaactcccgggctcaagcgatcctcccacctcagcctcccagatagctgggactacaggcatgcagtaccacgcccagctgattgttttagttttttgtagagacgaggtctcgctatgttgcctaggatggtcactaactcctggcttcaagcgatcctcccacatcagcctcccaaagtgctgggcttacaggcatgagccactgtacctggccctcttcctttttttctgattctcaaataatacaagctcaggatagaaactgttgaaaagcatagaaaactgcaagaaagcaagaaaaatcactaataaccccaccctgcaaaggccttcacatgtagtttgccattacttcttgattgtttgcacctatattatctaccttacaaattacccacgatagccttgtcttttctttttcaaatcccaggccaacctcccttggtcttggcctctttcaagttgatagggagtgtaaaagacaccccctccacttacaaacttgttatcagggacatttctagacatatgtgtgcatgtgatgttgctaacaagaatgtcttgtatatcttaattttttgcagccaagatcaggagctgttcattgcatttagtcattacagctctttaatgtcttataactttttttttttttttttttttttttgagacggagtctcactctgtcgcccaggctagagcgcagtggcgcgatctcggctcactgcaacttccgcctcccgggctcaagcgattctcccgcctcagcttcccaagtagctgggactacaggcatgtgccaccatgcccggctaagtttttatttatttatttattttgtatttttagtagagacggggtttcaccatgttagccaggatggtctcaatctcccgacctcatgatccacctgccccagcctcccaaagtgctgggattacaggcgtgagccatgatgcctggccacatttttcaatattagcataaaccaaacctgaccaagtgtagaaatacgtagtagatttccccagtatgcacctgtgaaatatgatgtgtaggatctgcaaatgggcactcccacctgcaacttcacattgacttccccttctctatgaaatgttccatgtgttcaagcttttcctccctccttaggtcaagctttagccacctctggggtctttggtgaccttagagcaagggagtgcccacttgtcattatcagggctcagcatgaatggttgaagaggcagttaataaaaatagcaaaagaaagaaaaagaaatgagaaggcattgcatagggacctgttgaagagggccacctgcccagcctgcctcctggccactcttgtgctctctgacttgtctctctgacttgtctgcccagactgagctttccccaggtgtgaagccaggaatggtgtggtttctaggttaatacctggggcagagtgtgtgggccaagcaaatgcagctcgtgggtatgccactagcttcactggaccccaaagtatcgtcttcagagttccagatggttctcgtgaaagagaaggatgaacactttgactgctcagaaataattatgggatgttgtccctccatcaaggccaaaccacagggtgaacattgacgagatgtggagcagggattttctcgagactgggcagggcccactctgacccatccatattcttttactgaaggcacatttttttttttcccttgagacagagtctcactctgtcacctaggctggagtgcagtggtgcgatctcggctcactgcaacctccacctcctgggttcaagtgattctcctgccccagcctccaagtagctgggttacaggcaagcgccaccacgcccagctagtttttgtatttttagtagagacagggtttcaccatgttggccaggctggtctcgaactcctgacttcaagtgatccacccgcctcggcctcccaaagtgctggaattacaggcgtgagccaccacgtttggcctaaaggcacatatttttacatctcagatacctggggttaaaatgtgacctatgaccacaagacgggccagaataaaatagaggaacatggaagaaaatgccaggggaaagccaggcatatctgtaggcccagcttccactctccccagaacaccctaagctgggagactcatcttggacacccccggccgtcccaccttcccctttgtgggaaatgttctctcccatccttcagccggcaacttaggctcagtactgcaagcctcggctcacccatcccattccagaagcctcccgacctttagacgaggccagaccccctggctgtgctcatggtacccttctgggcttcccctttctctgtgctactgtgaccacttgttttaaaattctgtctcaaaaaaaaaaaaaaaaagactgggcacggtggctcatgcttataatcttaacactttgagaggccaaagcaggagaatcacatgagtcaggagatcaagaccagcctgagctacatagtgagacctcatccctacaatgaacagaattatccaggcatggtggcttgtgcctgtagtcctcgctacttgggagactaaggtgggaggatggcttgagcccaggaggtcagggctgcagtgagccaagatcgcaccactgcactccagcctgggctacagagggagactctgtctcaaaaaaaaaaacaaataagtggctgggcacggtggctcacacctataatcccagcactttgggaagccgaattgggcagatcacgaggacaggagttcgagaccagcctgaccaacatagtgaatccctgtctctactaaaaatacaaaaattagcaggacgtagtggcatgtgcctgtaatcccagctactcaggaggctgaggcaggagaatcacttgaacccaggaggtggaggttgtgatgagccaagattgcgccactgcactccagcctgggtgacagagcgagactccgtctcaaaaaaaaaaaaaaaagcaaataaataaattctgtctcctgctcgactgaaccctcagggacaagaggctatgtctgcttggttcacagctctttcttagcgccaagcaaagggtcccgtggcaagtcggtccttggagaagacttggggagcagcctcaagagcaatgcagctttctctcccattctgcttgccccttagctcctcctctccctaaatgctaactgtgcggtgggccttggcagggagtggctgagaccatcactcaaacagcttaatggaacctttttattttcccagcggaatcacttccgtgtacagatggaacatccagaggcagcagcgactgtcctatggccacacagccagtcagtagcagagctgaggatccagtccatagtgacgtagctgccatcggggcaggcatgttccgggagcggtttcgagccgtgcacaccggcactgccttggcctccaggcatcgggagctgagccggtttgacacttgcaacacaaaccacttctccccgcagggccccaaagtcaccagatgctctggagtcggctcagtcggaggaggaagtggacgagctgtccctcattgaccacaacgaaattatgtccaggctgacgctcaagcaggaggtgagaacttcccgggctggggctttgcagcctggccccacagaggagagcaggtggggcagagaagaatgtgatcttgtcataagcagaacaaccctaggaggcttagagaccaagtctttcaatgcccctggtgagcctctgggctgtgggctctggaggggtagactccaggggaagtgtgctgtctccttctgatgcttatagaaagtcatcttacacaggtcaagttctgcagcctctctagctaaagatgccagaactcctgagggtgtggagatggaacccctgtaaatgctctgcagacagagcctgcatgtggccggccctcactaatgggaaactttttctgtggttgaaaaaatagctccactgtagcttcagtctgggagacagaggcaggggaatggcttgagtccaggcgttcaagaccagcctgggcaacacagcaagacccatctctaaaaaaaaagaaaagaaaattcaggcctggacactgtggattccctggtcctgtgccttgcctgcagaacctcgttggtgaaaaagggcccaaacctgtgacagtggagaggaagcaggacagagagtgccctgcctctccctcctgccgtgcagtgctagaagtacaaaggagcggcttcataaagcagccttggcccgcaccaggaggcaactgttttggggcttcgatttgatgacacatggacaaaagggcagatactgccctttgcgcactcccaggcaaggatgcgctggctctggccatggcagggagcagcccaggaatgtgtctgcgccttgggctgtcacacacaggcagggctgatgagggtactcacacagctgggctcctctgcagagagatccttgccataaatttcttccttaaaatcaggtcaaaggcatagttcctactcctagaggtaaacccaagacaatctcaggcctctggagtcaggaggtaaaataccaaagcctaaaaataaaaaggtgggctagtcccggagtgtgtaccgcagctgagagggctggttccgtccctccagcgttacagagcaaggagcattgagggccaggggcagaaacaggcctggggggttgtcctggacctctgttcctggccctagtcacagctctttttggctctacgctgggtggcctctgtttgcccacatggaagcaagacttgcttcttaagaggcaggtgggttggtggcaggtgtgcagcgtcagaagtcattgaatatttctgtctgtaatgctttgctctcctttaaggaagggccccacagaagaaccttgtgccaatgcaagtaacttctacttccacctggggagacggatttagatgtagggccgcttgctgcagttttggggaacatgaacatgcttagaaatagtcctgctgcctccacaggcatcctgggcaaggctggggactgtcttgcccccagggggtcctacctcacctctgacttgtggtttggtgagcaaggaaggatggaaggtgctatgtcccctggcccaagttgtgtgctcaaaacagtggcatgccctggtgccttggtgccggggcagctcccaggccatccagctcccagacacagtccagtttgtgcctgtcaccaagcacaaggtgagtctggagggcacccctggcttcgcagcgcagccacactgctcctgggccgaggagcacagaaggagaggggacttggggttgcagggcattttgtcatctcattcctgcctgtttcttcctaaactgattctctgaagggcatactctgcctcataccttccttggctgtgttcattacagggtgatgacgggccggacgtccgcggaggatctggggacatcttactggtccatgctactgagactgacaggaaaggtagggtgtcagtgagctcactagattggggctggtcctgccccgggtgccactcggcctcccaccgctatcctgtcccctcctggcagccacagccctgagcaggtctgatcagcagtcctggtgcgcctgagtcagagcagggagagcccaccttggaagacaagtagatcatgttcaactccaggcgtgcgtggcatctgtcctccgctggtacaaggtagtgaccccagggcctccagggtccttgaggggctcagcgcatactaagcgcaccacagacagcgccttgagtgatggcatgtcacccagtagtactaaacttaagataacatgcaggtaccttttgattcctttcctgactgctgagtcactctattgttgcagaccattagaccggacttcactcacatactccacaaggaaattcttgaaggtttgttctgtccaggaaccttcaattctgtagcagtggcctcagtttcacagcacacagctgccccaccctaccacgcattcagtgtgctgattgagagggctggaaaagcagggaccgtcccctaatccctaaaacgtcttgttgggtggactctgctagcaaaagagttgtcattcccagtcatgctctggaaaggaggtgctagtgacctgatggggcatggccacagcacccttcactgcctgccctcaaggggccagcaccacctggccggccagtctctccacacgctgcttctctttttacgtttaaaaaaatgatttaaaagatgatgtcagagcaatggtgaagtaaattgtggagggaatgaaaacacccccaccttgaaatcctagcccaacccgtttcatttctgtaagggactctgtccctgtgtttcctcagcacgtttcccaaaacatgtgacccagagtgactcggggaatttctgaattatggaagtagtactaaaaaatatttacattgcagaaaattagagaaaaagaagagatggctcccacaaactcaccgcagccactgctccgccctccccttcactgttccctcaccctttgtttgttctgaccagggcagggcccagacctggcgatgctgcatcctagccccagctgtgccatgacaggctcagagggcccctgggcagtccccgggcttctcggcctgagccgactccacttgttgaaggggtgaacggtgcctgttgttgtgtggattacgtgagggagtgtgaaacctgccccgcatgtcagcggtgctgggggcgtgatcagcagcatcctgagcgccgagtgcagcccttgcttggcttctctgcagtgaatccccctccctgcctgacatggggggctccatactcagccaggcatgggagcgactttcatttcctttttgtccacagcgaggggctgaaatgggagctggcttcagacctcggctccaaagggtgaactccactgtcctgtcgggtacagccagctgtggccaaggctggaggggtccctgagacaggacagccaagaggcttctggcttttgctggctggacctgctgagaggacgctccgtgccggtgggagctttgcctgattttactagcagaagggttggaggctccccagaaccaaagttttacgtaggaagtattactgaggcagaagccatggctccactgggagggtgaagcaccctgtggcaggtaacaaagcaagctccttgggcaggtgcatcctgcaagccagagactgcaccagcatcacgagcagctgggagccccgtggctcaggcccgtggagcccagcctgccaagcagggcttggcagggagaggccgtgtgggggtgctttgtggttgcacggctctgctctcaggtgtcaggacctgcatgggagaaggtcaggtcagccttggcctcaggcctcagcttagatcctgtctatcccttgacaactgtgtgccaagcctgtcacttagccccggagcttccgattccttaggaggaaaatgagggacaatttcggggccttttagggctgtcacaaagaccaggtgagccagggcgcacagagtgctcaggaccgcatcgagagtcctgtgatctctagaggggtggcacagcactgcccgtcccagaagccaggcgctgtcccatctgccataatccagggcacagcagatgggggagggctctggaattgggcagacatgggcgccgaccccgccacattgcttgcgggtggtgtggcctcgtgcctgggctcctcctctctcggtagggtaacaggactctgtccttgtgggattgctctgggcattgaaggatgtggcatatgttcaaggcatggcccagtgctcaccagcgagtcccacgaagttgtcatggctactggcaatgatgcacccgcaaaggccagttgacttgggccccttcttccagaagcaggtatgggtctatgctggtgccatctctgcttccttccccaaactctttgaacaaaaatccaagcttgacagtgaactgggtgggtgtgggggccgaggaatgagcctgagcacagtgcggatgggccctgctgtgattcccagcccggagcctccttcacctgccagccccaccccacgcagcccccagtgcaagagcaggcgtgggttttcctctcgtttgatgcaagaggggatggggcaagggtgggggcaggagccaagccagcatgactcagctggagatgtgggttcctcgagattcctctacccagcagctcgggaatgagggagaaggtgggagcaggtggtgtatgtccagagcacaagatttaagcagtgcatgtttgcacccagcctcacagtgaggagcacagctgcggagcctccttgggcctcacacctcagcaggcacggggggtggctgcagggagtgagtctggccacccgttggctcaggcagtgtcctacattttaaaattccacttcattctgtaatatcagagacagcacagttgagaaggtgtcaccacagcaaataaatagggctgttgtaattctggaaagtctgggagtccctgactggtaccagccccctctaagaggaggcaggcatggagaggtgaggggtaagctggagctgccagcccacacctgcccagtggctggcaccatgcctctccttggtacccggcccaagccgtgcctcttcagcctatcccttaggacccaaaacgtggaatttccccggatttttctgattggaccctaccatctaaaagtactgaccaggcacggtggctcacgcctgtaatcccagcactttgggaggccaagctgagtgaatcacttgaggccaagagtttgagactagcctggccaacatggtgaaaccttgtctctactaaaatcagccaggcgtagtggcgcgtgcctgtggtcccagctactcgggaggcttgaggcaggagaatcacttgaacccaggaggcagaggtggcagtgaaccaagatcgcaccactgcactccagcctgagtgatagagtgagaccctgtctcgaaaataataatcataataaaaatttaaaaataaaagtaaagcctagggtttcatttcaggatcctgctgacgggtttgaacagacgattttctttgttcccatgatggctgagaccctctgaagcataaagccttaggacaggcagagcctctcagagtctaatccagggctggctcctacctggaacaggcatgccaccgggttttgatgcctagggcaggcgtcactcgtcagcctaagtgcccttttcccctgggaccagagttggcctcagctcccacagcacggttctccaggcagcaccatcatcggtagaaagtgcccatgagataaaaccctttcctgtttcccctctctgatctgccgtttcctttgagagatggacagagaggacgtgtgtcttctctgggacatgcaggcggagacaccagagggggttcccaagccctcggctccctcgcccatcccactccccgtgccatctcccctgcctctctcagagcaaggactcaaatccaccctggctaccaccccccagcactctgcacccagacaagcagtttgcattgtttttccctctagatttggtgttgtactgcgaggcattcctgaccacctacaggaccttcatctccccagaggagctcatcaagaagctgcagtacagatatcctttccttcctgacccagggcccctgcaccatgggcattttggagagagagggaccctcttgcccttcagtcctcgtgggggaagccgagcagcatattgggtggcagtgtgattgaagtagggacacaggagccccatggaccgaggttcccacctctaccctcctgcattccagctttgagctcaggcaagttcctcatctctaaaagggccgagtgaaatgatgtgaagaggctggaacatagtctgggaatgtgtgtctggtggcagttgtggtcattggatgattctaaaaacgaattagacatgccccagactgggaggggcaagtgtgccggtcctgcagacgcctctgagagaccctcatggtcggctccggcagcttctcagagctgagccccagggcgttgggcacgaaggataccaagacccaaatagacagctcaggggtcagcacagtcaccttccctggagcggaccctgcgactgccacatccacaactggaatgggctcctgtccccagatctaccccatgggcccaccctcagtaaatgtcaccctctgcagtagtggctgaggaggaccccaggggtttggaaggacccacttgtgtgacccattgcctcttcaagtccaaacctgcccatcctaagaggctgacctgcagctgctgctctaggagggtagcctgggtcagctgctcctcagccacctctttgcacatagcccacggctgccatctgctgggcagccaccaccacctggggtaggaagtcctgagtccacccgcgcccccgctccttcctgtgtgccctgagccttcactgctccactcagggcctcctgcagacctcctggcctcctattctcccctcgtgttgacctttagaatccctgatctatcaagacagacgtggacatcctccattggcggagcctcgggtccccggcaagttctgttactcagagcacctgctcacaggcctgactcagtgaatggctgtcactcacacgtgtcaaggacttgctggtcaggcgagatgtgctttacacctgtgctttcacctagccctagctctatgaccattttttaatatgtgtgtgtgggtgtgtataaaattaccatattatacatggggccactgctctataactccctattgtgtaattgaggaaaccgaggcccagagacatgaaggacctgacccatgtggctgcttggtgggagagcagccacacgctgcttgccccctgctgcctgcgcccaggctctcagcctctgcctggctcagccatcatggaaatattgcagcatcaaggtctgggcctggttggctggcgacccctgtgctgtgggccaagacacagtccctggtacgttgctctgtcctgagccccatgacttggaaggtcgtggatcactagagagcaggcaggagggtgtcagagagatctggggagtcgatggcgagcacaacagccgggcaggaaaccctgaccacaaagcagagcccgacctcagggcatgagctagagctgatcgggtgcttgaagtgctgccctggagacagggagccaatgtggagcgtgctgcagctctgggaagagagacccggcccggtgtcacggaggtgagagttcccttgcagagcccagggaggcagcctcaggatggaaactcacagaaagactggagggagatacttctggcctacacacctgcctagggacctggggtttggagggtgtttggtttgggcccaccgttctctacctaaagttcagcaaggcactctctacgtgtctgtaatctcatgggcacctcggggtgaacccgatggaaaggcgggtctggacagtgcagcggagatggcgtggcagggaggagagggcagcagccgggggcatccctggggacagacgcctgtgctcaaatcctggctttgcagttgttccactgcgctagtcccgtgccctcgtttctggatgccagtgctttacatgcaggaagatgggcacattgtgagcgctcagtgagtggtcaccaggagtcagtcctccactccacgaccctcagccggccacatggctatttctttaacccgtgctccacatatgagaaattctctccctttgccgacacattcaagaagcgcgtcagcaagaacacgttcttcgtgctggtacgggtggtggatgagctctggtgagtgcttcacccttggggtcctgggggccagtggggaggcaaaggctccattccacctgcttctcctgcccatcggctctgggcagagctggctcttgcctgctctatcttggtcctttgagagaatggcctgtgcccgatagaccagggtgagatgggtgaggtgtctctccaccctgcacccaggccctggatttcctcatgaggtccctcctggaccctcaggagagaacccgcccaacgcacctgctcccatggtatcttaggtccagtctccagcaggccgtgctctcagccgccagccatggtggaggctgtgtggaggctggaatgggagaggccacctctccctcgctcctcagtgtttccatggctggccatctgacagcatggcacttggccatatccgttccgctaacaaatctccatcaggcggactgccttcctcctgctgggggagatgaccatggtaagtggctgtgcggctgggaaatggccacgtgtggacagtgctcagcagggcaagttggggagcatctagtctgagaggccgggaagtcttggtgtctcattgcccaatgggagcagcagctccccagggcgggattcgtgtaggacttgtccctgcagcccaggccccagcacagtcactggcgcttgtccagcgccaacagatggctgttgagtgtgtggcaggtgcttgtgaccatcccaacacctccaaggacacaggcagccatcccaggctctcgtctcctgctctcttcccatgagaaatttcccagccagctctgtgccggtcacagccccgtgccctttgtgtgtctcaaggcaaagacagactctgcctgggccttgcgttcctgctcctcaccttgtgctcttttgtccttcagcctggtggagttgacagaagagatcctgaagctgctgatggaactggtcttccgcctggtgtgcaatggggagctgagcctggcccgtgtgctccggaagaacatcctggacaaggtggaccagaagaagctactcaggtgtgccacctccagccagcccctggcagcccggggggtagcagccaggtgagaagcccacctctccagccctgcctcttccccaggagccgtgcctttctcagtttaccctccctccctgccagccccacagccccatcctggttctgcacaggccctttgatgaggtgcctcaggaacagccccgtggatccctgggggctgggcctcttctccaggaggcacatattgggtggtgatccctttgtgaccaggaagcgggcagcagggcatggggcttcataggacagggcaggagtgcacacaccctgggctgtggtcagttctgggttgtcccagcacgaacatggcagtggttgatgccagtctgtggcccgtcccctcgacaccgacggtgagtgtcatttgcacctatacatgtctgttgagtagtgggctccttccagtgagcgcatagccttcgtttctttggcaccatctctgttcttgctggccacctggaagtgggctccagccgtgagcgagccttcttggcatctcaactgtccatgagctcacgagggaaactcagtcttctgattccagaagctgctggacatacccagcagaagcaggagagaaaggcagacagtgtcgtcccggagagaggcaggaggccattagggccccagggagccttttggggcttccccgccctgtagcctccacgctcctgctgggcagagaggctctcctgctctgacgcccgcagcccgggcctgctcagccctccccaccggcctccccacccctgacggctcttctcacacctctgtcttccaggccggggaccttgcacgactttcacagccatgagatagcggagcagctaacgctgctggatgctgagctcttctataaaatagaggtacaggctgctcctgccagggggagccacactgtttgtccctgaatgagagaaacccccatcaggggaaagccggggctccacctccatctgccttctttccttttgtagattcctgaggttttgctttgggcaaaagagcagaatgaggagaagagccccaacttgacccagttcacggagcacttcaacaacatgtcctactggtaagagaggcccagcgccaagccctgttgctctggatggtggcacgtctgggtgggctctgcgttttcctttgcagggagctagaatggtaggagaaggagctgcctctttcattccgctaagctcctgggggttcccatgagcactgacaggctgaggacaggggcagggacaggatggggcttgctggaagtggccacctggtcgaggaggctcagcagggaagagtgccagggtcgaggagcgatgtctgccataggtggtgttgggaagggcgtgagtttgccctcctgccctggtcactgccaggcaatctcaagctgatgctcacactgactctgcctgacagaacagttagcaaaggagtgggctctataacgttaatgtttgcatttagtctttaattcgtgtgtgtgtgtgtgtgtgtgtgtgtttgagacggagtctcgctctgcaggtgtgtgtgtgtgtgtgtgtgtttgagatggagtctcgctctgcaggtgtgtgtgtgtgtgtgtgtgtttgagacggagtctcgctctgcaggtgtgtgtgtgtgtttgagacggagtctcgctctgcaggtgtgtgtgtgtgtgtgtgtttgagacggagtctcgctctgcaggtgtgtgtgtgagacggagtctcgctctgcaggtgtgtgtgtgtgtgtgtttgagacggagtctcgctctgcaggggtgtgtgtgtgtgtgtgtgtgtgtgtgtttgagacggagtctcactctgcaggtgtgtgtgtgtgtgtgtgtttgagacggagtctcgctctgcaggtgtgtgtgtgtgtgtttgagacggagtctcgctctgcaggtgtgtgtgtgtgtttgagacggagtctcgctctgcaggtgtgtgtgtgtgtgtgtgtgtgtttgagacggagtctcgctctgcaggtgtgtgtgtgtgtgtgtgtgtttgacggagtctcgctctgcaggtgtgtgtgtgagacggagtctcgctctgcaggtgtgtgtgtgagacggagtctcgctctgcaggtgtgtgtgtgtgtttgagacggagtctcactctgcaggggtgtgtgtgtgtgtgtgtgtttgagacggagtctctgcaggtgtgtgtgtgtgtgtgtgtttgagacggagtctcgctctgcaggtgtgtgtgtgtgtgtttgagacggagtctcgctctgcaggtgtgtgtgtgtgtgtgtgtttgacggagtctcgctctgcaggtgtgtgtgtgtgtgtttgagacggagtctcgctctgcaggtgtgtgtgtgtgtgtgtgtttgagacggagtctcgctctgcaggtgtgtgtgtgtgtgtgtttgagacggagtctcgctctgcaggtgggtgtgtgtgtgtgtgtgtgtttgagacggagtcttgctctgcaggtgtgtgtgtgtgtgtgtgtttgagacggagtctggctctgcaggtgtgtgtgtgtgtgtgtgtgtgtgtgtttgagacagagtcttgctctgcaggtgtgtgtgtgtgtgtgtgcgtgcgtgtgtgtgtgtttgagacggagtctggctctgccgcccaggctggagtgcagtggcgcaatctcggctcactgcaagctctggctcccctcaagctccacctcccgggttcacgccattctcctgcctcagcctccagagtagctgggactacaggcgctcgccaccacacccagctaattttttgtatttttagtagagacagggtttcaccgtgttagccagggtggtctcaacctcctggcctcgtgatccacccacctcagcctcccaaagtgctgggattacaggcatgagccaccgctcccagcctagtctttaattcttaaagcaaaatgaatcccagtaatgtgtttataaaccagagctcttgtctcttcaagaggcgacaaagcccccatagcagctcagcatcaggcaggaccccctagagctcagcagctgtgccacccccacccacccactgttgcctccaggagaatgtctgatgtgttttaaaggccccgagatcatctcccgtttgcctatcttcctccccacagaagcactccatcctggggaaaagcatgtttagctatggcagtccagcgtagggttttgcccaacaggatgtggtttctaaagcagacggaagctgcacacaaggccccaagcctggcttctgacaccagcctctggctgggtgcaagaagctcaggggcacactccacagggcctggctgcacagaggtgcgagtgcagtggctcacatctataatcccaggactttgggaggccgaggcaggagggtcacttgagcgcaggagttcgagaccagcctggacaacatagagagacgccccccccctacaaaaaattaaaattagccaagagcagtggtgcacacctatagtcccagctactcgggaagctggggcagaaggatcagttgagaacaggagttcaagactacagtgagatatactcacagcactgggtgacagatcaagaccctgtctcttaaataaaaaagaagaaccagcagtgcaaagtgcggcaccacctccaagtgaccctggtagtggcccctgtgaaccacaggaaattgaggccagggtgacatccctgctgcatttatcacacagatgagactggcctttggctttggtctcggctttggttgctactaaggttctgagagtttccttccctcgtggctgcccaaggtgacctcttacctcacgtgctagcgggtctccccgagccagtcctgcatcacacaaggaacttgcccagccccctggtacttggggcccatgcttgtcaggaaaggctctgctttcatcctcccatgctccacctgcagattcgaagccccctttgggccttcaccagatttccttatggtcaccagatttattgtcaccagatttccttgtgcctctgtcccaggatgttatgagctcctggagagcagaaactagatctatgcctggggcaggctgcaggtattcagtaggggtgggctcgtggccactggcatgggggtcgtacaggtcctgtctccaccaggacccctgggacctgcagggacttgtcaactcagctgtttctttttcccttggtccatgcagggtccggtccataatcatgttacaggaaaaggcccaggacagggaacggctgctcttgaagttcatcaagatcatgaaggtaatggtggccaagtccttcccaggcccccatcatcagtccctgctctgggagcccgggacccgcctgccctcctgcctcacggcaccgcccctctctcggcagcacttgcggaagctgaataacttcaactcctacttggccatcctctctgccctggactcggcgcccatccgcaggctggagtggcagaagcagacttcagaggtgagtggccttggggcgtgggcgggagggtggctggtaaggggggccgcccagccctcaggcgactagctgtggcagaaagtgctcccactggagcaaatgctgggcctaggcccctgctctgccaccgacatgctgtgtgaccagaacagctgccctcccgccttcctgtctctgatccccaatcttcaggcccccgggagcttcgaggttggttctggggtggtcacatcccggtgttctgctgccacccagcaggcccatccctgggttcccgcctcccccgcccgccctcagcccgttcttctgaagggtctgcttcgggccgggcactgcggtaggtgctggggacgcactgtgaacagcccaacatgatgttgggtgagtttctgctagataagcactaaaagaagaagggtgggcaggtgggccagcccagaggaagtgtcactcatgccaccatctgcagaggaggaggagtttcctgggaagggaagagaatcaaaggggacaaaggagtgcacagccaggagcaggtgggggtcagcacctccagggacaggaggaggccaggggaccacatcccgggagaaggggaccagttctaggtcatgagagcctcaggagcctggtgaggagttggacctttatcctgtgtagggaaataatattgcaaatgggggcaaaacccatggcttttgagtgtcagccaggccacccaggggtcatgtcagggacccaagttcagccaggccacccagggattgtgtcagggacctgagtgtgaccagaccacccagaggtcatgtcaggaacccgagcgtcagccaggccacctgggggtcgtgtcaggaacccgagtgtgacccaggccacccaggggtcatgtcagagacccgggtgtcagccaggccacccagggtcttcttgttcaagcccatgttcagggatggttgtaagctagtgtatggggagaggtgggaaattcacacggcctctgcatggggggtcctcaggaggcagcacttcagggagaggcacgtaacaggagaagaggcaggagaggggccttctgagtggggcagggctggctgagtctcctaggtgggagccccccacccctgcaggagagaagccacccagccctggggagggcgaggtcacatgctatctttagttggtcctccctgagtacagggcagagcaaaggcagctccgagtcaggagtgacgccactcagtgtgtgcctgggaagctcctctggctgcaccgccgaacagggccaggcaggagcccatcttccgggatgtcgtatacacgcaagcgctggctgcccaggcacaatgagtactgtggggtgtttctccacaaaacggcctgaagtcccctgtgaccaggggttgggctgacactcgttgaaaaggacagaatccctgctggccagggccaggacccacacctggctgggtgtttgtgcgtagtgggacctgtggagttgggcagagggtggttgaccctccagttagtgaggaggaccagggctctgccccagcattgccccagcactcgctcacccctgtccggtcctgtcctgtcctgtcctgccagggcctggccgagtactgcacactgatcgacagctcgtcctccttccgagcctaccgggccgccctctcggaggtggaaccgccgtgcatcccgtacctgtgagtagcagcccctccaggcccccagccccgcctgggtttgcctccattgctctggggaagatctgtcaggctccagcagagaaatcttaatttaggggtttctaacggagacatttgtacttggttttacttaaggttcttgtaatacagttataatgcataatatacaatacatatatataatataatatataatgcttcttataatacagtttaaacagaaaagaagcgctcaggtgaagaatacgggttctcctttcccagcccccagccccactctcatttccttctgtagcctgcccgtgagcatgtgcagccatgcttgtgacagatgtatggctcctctccccacacatggcatcacacagtattccagtgtcctcacacgtggctgcgcattagaacaacctgaggatgcacggccacccagggaccttgagagccttggtgtaaagaagttcagaaagtgcttcctgagcgtggaccatgggcgagaggaaatatgtgtttcatagaaaagggacgtagcggaataaccaaaaccaaacaagtgtctgttgcaggacttacgagagcctttagtatatactagtagacactgagaatctccaagagaccaaaagcgcagcagcatcccagtgctgagtgttcaatggcacatcctatagggttactgcagggctgccctcgaggcctcaaccctcagagatacaaatccccaggcttcctgctctgagcactaacagtctttcccactgtggctctacatctgctccctcaagctgagttctccctgagtggaggaactgcccctgtctttctcatctggccttaagtcctctgcggtcagaagcacctattaagttactacaccttgtttgtttctttgtttctttgtttgtgatggagtctcactctgtcacccaggctggtatgcagtggcatgatcttggctcactgcaatctctgcctcctgagttcaagcaattctcccacctcagcctcctgagtagtcgatgggactacaggcatgcgcaaccacgcctggctaattttttttttttgtattttttttagtagagacggagtttcaccatgttggccaggctagtctcaaactcttgacctcaggtgatccacctgccttggcctcccaaagtgctgggattacaggcaggagtcaccacacccagccagtttctttgtttaataaagacggagtctctgtcacccaggctggagtgcagtggtgcaatcatagctcactgcagccttgaactcctgggctcaaggaatcctcccacatcggtctccttagtagctgggattacaggtacacgccaccatgcccagctaatttttgtattttttgtagggacgaggtcttgctatgttgcccaggctggtttcaaactctttttttttttctttttttgagacagagttacgttcttgttacccaggctggagttcttgttacgttcttgttacccaggcagtggcgcaatcttggctcactgcaacctccgcctcccaggttcaagtgattctcctgcctcagcctcccgagttgggatgacaggtgtgcaccaccatgcccggctactttttgtatttttagtagagacagggtttcaccatgttggccaggttgatctcaaactcctgacctcaggtgatcctcccaccttggcctcccaaaatgctgggattacaggtgtgagccaccacacccagcctagctgttctcaaactcttgagctcaatcctcctgccttagcctcctatagtactgggattacaggtgtgagccattgcacccagcccaccacacctgttaataaaaggagatctctgcccctgccccctggtttgggttttgttattttttttttttactgctcatttgttaatgttactttagcagcccacagcttcgcccttatgggttgagccatggcagccgcatcaccctcaggctcctcatcagcatactggcttccgaggtccccagcaggtgcttgtggagccagaggccagaggctgaggcgggagtttgttctgggaaacagacacctcagactggctctttggtttgctctggggtttggaagctgctcactgcgagtcctagcgcctgacacatgtctctagcccttgctgcttccaaaccccgtagcagtaacaggctgcctaacccgtcctcccagggggctgatcctgcaggacctgaccttcgttcacctgggaaacccagactacatcgacgggaaagtgaacttctccaagcggtggcagcagttcaacatcctcgacagcatgcgctgcttccagcaggcgtgagtgccactgccccggggggaccaggcagagctgagccccgggccacacacaaggagagacagcccgggacaccgaggggagggggagccacagaggacccagggacctgccactgctgagatatagtccgggcccttcagtttctgccaggatgacttgagagcatgcccaccaggctccatgccaggcctagcctggccctgggcctggaccccgtgacagcacagctcgtcctcccattttacacaccagaagctggtgcccaccttgctgtgagaagggcctgacaaaccctggcctgcctgactctgaggcaccagagctcccccagggcgggccctggcatgcgttgttgggggcagtgggatcacctggggccccctccctgtgagcagcccagcctcagggccctgtttgtgctccatgtgctggtggcaccgtctctgagcactggtgtcccctctgtcacattggtcaacggtagcccctgcagcatccgtttgctgcgaggctgtggggatggtccccgcggcaccttccaggagggtggcgccatcgggccatccagcccacacaggtgctcactgactgctccccatcccctgcaccaggcactatgacatgcggaggaacgacgacattataaacttcttcaatgacttcagtgaccacctggctgaggaggccctatgggaactgtctctgaaaattaaacccaggaacataacaaggagaaaaacagaccgggaagagaagacctaggagcagacgccgggatccaggagaatgctcgaggggcgcagagggcagctcccagaccggagaggaccttggacctgttaggcgcatggcaggagtcccggcctcggagccatgaggctggccagccctcagcggggccgggcgggagctggagcctgccagccgcttcctgcctccttcctctgtgggagcagacccgtgggcctcagggcagccagcaggcaggtcttgttgccaatttacaaaccggtggttttctggtttggttttgttttctgcttttacttccatctctcccctcttgaccttccacccactcccctccagggagagagcagcagagacctcatcagcagaccaaggaagtggtgggtgctccccctccctaagctccagggtccctgaatcttctgaaatctcaaatgagtggaggcctcctggggtggcctgtcctgcaggggccctggaatgggggcaagcagctgggtgggcagaatgcagagtagactcgggggaggatcctttcactttccgcttccccttctgatgcatggaggatggtgtgagcttttcagcaggcccggaaaggtacgcaggtgacgccttagcagccccgcagctggtgctctgccccgcggtactggcgccatcagggcctcccttgcccgcctgagagcagcagcagtctctgtcatcccgtcgccccttaccccccaccccaggccactgggcccctcccacaccacctggggagctgagaagaggaggctggagtaagggaggacttgatcatccaagaaatactttttattgctgggagtcttctgaacctcaccaaactgaggccagagctgagctcctgggggagttaattcagaggggagaggccagcacctccctcctccattgctcgctgtgtgccttaaactccatctcatgtccctccccatcccctggctttccctccctccttgccccatcctgggccagccagcagggctcctcctctggctcttcagacctttcagccagtgctgtcagtgcccctgggagggaagggcatccctgaggcacccgaatggtccctcagggtgcagggaggcagaagcctggccacagaggagcctcctaaggcagcagctgcagcaagcgcaccctctccccactctccccacgccagagcggcttccagagcagatgctgtttccatcctcctcgtcaaaaccattctcgctgctgagcttgacaatctgggcaaggcttgtggggcgcttgacaaacagaatctgccctgtgccgcctggttccgtggcctccagcatgagcctgcaggcagggcgctgcgggaacccagttgtgctgccccagcccatgcctccgggtctgctgtgcatgaatgagtgctcacttgtcccgggtttaggacgtggtcaagtgaacagcagggtctaactgtgcttacttagcccagttcaaacagaacaaaggaaaaatatagaaagcaacatctgttgatcatttaggtttttttttaaaccaccatgtcactttgagtccttcatgggtttttgaacagcatttatcaagaagaaaatgtgggctttttcccctctcccgtgttttgtttgtcctgtagatagagggaggaaagccgtgcagtggcaggcgggaccccctctggtggcgggaccccctcttgcggtggtcttgcggggccagccgggacctgtcactttattatttaaggagtgtgtgtgtagagtcgctggcttattaacagtattgtgtgtgggttgggtttttagtttgttccttctttttgaagtcccttcatttcaatccttgactctctctccccttcccttgcccagctctgttgaatgctgctgtgcgcgtgtgagggccgctctgcacacagggcccttgggttgtgtgaactgaaattctccctgtatttgtgagactcgcaggagtccccatctgtagcacaggcaatgccagtgccatgctgcagcctcagaaaccaggcctctcactccagcagcaggcagaaccgtgtctgtggtcgggtgctgtccacagctctgtctgccttgttcttgggcttgagctggatagaggtggggtctcttcaccttccctgaattcagaacagaccctgtgcctggccccagtgtgcccaggcaattccccaggccctcattgggagcccttggtgttctgagcagcagggcccaggcagcacatgagcagtgcccaggggctccctgcgtgaggacggcaaggtgcgatgtatgtctaacttattgatggcaggcagccccctgtgccccctaagcctggccctggttattgctgagctctgtgctcagtgctgcggcctggccgtggctcgtctgttcctttggggggcccgggcgggttgtgggaatcagtcttcacagacagacgtgagccaggcggaggactcgttccttgcagaggtcagtcctcacctgcaggtgtcggggtgggggggggcaaggaggggcaggcacacaccatgtctgacctgaacccgattctggggagcatcttcccgctccggccccacgacctccacagggttacattgtaatatatatgccccagctaacctgtctgatggtggcatcttcctgcagacatttcaaacatgtaacttttatatgaaaaaaaataaacacagatgaaagctgcccaatgccatgtccgcgcccagctgcatgtgtgcaactacagtgacagcccagcctgctccatgctggccttgccatctcttttctgagacccctgtcgcaggcggggctcctgggaggctggggtcattcagctccactcccaggcccacttgctgccattggggtagtcgtggctgagtgaaatggacgtcaccagaactttccctcctaggccttgtgccctagaagcattcaactggacaaagaattgctcgtgctccagaggtcggttcatgcacaagagcccctcaccccagtgtcctgatgaaaagggcattcctcgggtgggattcgggggcacaggctctagaattgctccttcggggcccggaagcactgtctttatggcgtgccttttgcggtgtgtcctctgccgcccaggaggcagcacacagaggctcgggcccagccccagtgaagaacagcagagcctctgcacttacaagggacagagtgaggaggccccagggattccagtcccttctctgccccgaggtgtgctgtgtcccctccatgcggagtaaggcacggggcccaatggctctgggaggccatttgtctccctgtcttccttgtcctcccacaccacagcccacctgtgccccattgtttccatcctagcacctgagaccaagcaccccagcatagccacccagggatggcggggatcagggccagccctcatattcaccctggttcccagtccccaactttcagccccacggcggcccctggggaagcccaggatctctgcatctctctgtacctgatcgtgcagaggtcaggcctggtgaggaggaggcatctcccctcatgccccgcaaaggcagcagcttaagtctgtccctttaaagggaaggggccaagtattcctgggctgatcacaagatctgatagaagggaccctgcatcaggcaggcatcaaccatccggagctgttggctgcctgtgtgtcaggcgccaacgccaaagcctccatgaacctcgtaggtgatggaagcccaggttctctcttttgttccttgtgtcctcgggcagattgctcagccactcatgcctcaggctcctcattatctgcttttgtccatttcgaccaatgagcacacagaagcccgagagagaccagtccactcctgagtcctccactcgcatctccctcccctgccagcaatgccaggaagctggtctggccccaacaaccccagtgagcaggaggtgatgtgccaggtatggacctcaggcctcagccttcccaccagggctgcggggcagcagctgctgcgacccaccctggtctttggtgaccggcagaccgcgagattcaccaagggagccgccatagtcacggaggaaacaccttggcttccaccccacccccacagtgtccccgcccaggacctgcgagtgtgcatgcttagccagtaacccaggaggctcagatgcctgctccaaccaagaactgcggtccccccgaaggtgtctgagctgagggccccaagcctcccacctgctctgaccttgcagtaggtcgacaatctgggtcccgcccccagtggtgcaaggctggagaatggggtatgatggctgactgctcattgttccccctgtgggatgggaggcaggccccagcattcattcaaaccttttttttcattcattcactaggggtgcattatttaggaagcagtcaaggtgtggttcgggccatctgagtccctcattggctgccagcagtctgggggaatatgtccttggctgcaaagggctgtgtcctgactctgcagctgataagcaaaaggaccctgggtaagtggttttcttctctgcttggcagtttccccagctggaagtggggtaataacagactctgctttctaaggtctcacaaagtttcaatgagttaatacttggatataataatattttggggtaccaagcactttgcagactgctttacctcattcacttctcttaatcgaaaaatcacacaggctgggtgcagtggctcatgcctgtaatcccagcactttgggaggccgaggcaggcggatcacatgaggtcaggagttcgaggccagcctggccaacatgatgaaaccccgtctctactaaaaatacaaaaattagctaggcatggtggcaggcgcctgtagtcccagctactcaggaggctgaggcaggagaatggcgtgaacccgggaggtggagcttgcagtgagccgagatcacaccaccactccagcctgggcgagagcgagactcctaaaaaaaaaaaaaaacccgggtatggtggtgggtggtgggcgcctgtaatcccagctactcaggaggctgaggcaggagaatcgctggaacatgggaggcagaggttgcaatgagctgagatcgcaccactgggctccagcctgggtaacagagtgagactctgtctcaaaaaaaaaaagggaaaaactaaacttgttttatgaatggaatataaccttgacatcgaatcaaaacaaggacagtacaagataattacaagtccgtctgatgtatgaatactgatacaaaacttataaaatcatcttagcagccccaaaccagcatcacataaaaatcagtccttcctgaccaggttgggcttatctcaaaaatacaaggatggaataatttcaatcagttaatggatgtcactgaccccatgctagacgctgctgctccacacgtctggtttgcatctccttcctgggcacacaggggactacacttcccagccccctgcctgagatctgagaggcagacacatgtcactgtgggctgggcgtttaaggactattgtgcagctccctacttaatctttcccacccgcggtactcctggagtctgggtgttgagatggcagagccccgacttgggggagcctggtcagggaacaccccactcacccacacggggcttgcttgatgtgaatgaaaaatgaagccatggagaccagggttttttttcacggcatggcctcgcttctcccgaatgtaccacgttaacaaattaaagggagaaagccatagaatcaccgcaatagtcacagaacagcctttgttaaaaatgcaacatccattctttttttttttttttttttgagacggagtctcgctctgtcgcccaggctggagtgcagtggcgcgatctcggctcactgcaagctccacctcccgggttcacgccattctcctgcctcagcctcccgagtagctgggactacaggctcccgcgaccacacccggctaattttttgtattttcagtagagacagggtttcaccatgttagccaggatggtctcgatctcctgacctcgtgatccacccacctcagcctcccaaagtgctgggattacaggcgtgagccaccgccacctggccattatttttattatgaataacaaaaattcagggtttcgcttttgtcccccaggctggagtgtgtggcatctgctcactgcaacctcgacctcccaggctcaagcgattcacctcaccctcccaagtagctgggcatataggcacgcaccgccagacccagctaattttttattttttgtagagaccaggttttaccatgttggccaggctagtcttgaactcctgagctcaagtgatccactcatctcggcttcccaaagtgtagggactacagacgtgagccaccacagccggccaaaaacctttttgttaactagaaatagaaagcctctttaatctgatgaaggttaccttccaagatcgtatagagacatacttaattgtgaaatattcaaagtgcttcttttaaaatcagaaacaagagaatgatcccactaactccttgtctgttcattgtactggagatccttgccaatgatgtaagaaaagtaaatgactgagagatgaacaagaaaatctatcaaggtggctagctatacaaccaaataaaaagttcagcatattcctatatacagtcagtcagcaatcagaaaatgtaatccttttttttgtttgttttttgaggatttggggttgttttctgttttgtttttgtttttgtttttgtttaatggtgtcttgctctgttgcccaggttggagtgcagtgatgtggccacagctcactgcagtctcaaacttctggtctccagcaatcctcccacctcagcctcccaaggaactcagattacaggcacgtgccaccacgcccagcttcaaaaaatgtaattcttaaaggaccccatttatactagcatcacaagtcttaaggtcctagaccagcaaaagatgtgtgaaacctttataggaaaaatgataagattttattaaaaaccataaaaaaaaaaccttaataaattgagaggtgtgaatgtttgtggataggaaaattaactttctgggagttttttgagacagggtctcaactcccatcacccaggctgcagtacagtagtgtgatcttggctcactgcaacctcatattcctggactcaggtgatcctcccacctcagcctcctcagtagctgggactacaggtgcatgccaccacctccagctaattttttttattattatttttagtagagacggggttttgccatgttgcccaagctggtctcgcactcctgggctcaagcaatccacctgccttggcctcccaaagtgctgggattacaggcatgagccaccacacccagccaatttttgtaaagatgtcacttctcccccagataatgtataaattcaaaactattccaaaggaaatcaaagaaggactttatgtggtccttgatgaagttaattctaacatgtgttaaagaattaccactctggcgattccacccagccatcctgctaggaaagcttgatcagattctaaaaccctacctgcagtcaggtcaggtggctctcacctgtaatcccagcactttgggagccctaactgggtggatcacttaagatcaggaattcaagactagcctgaccaacatggtgaaaccccgtctctactaaaaaagaaggtacaaaattagccaggtgtggtggcgcattcctgtaatcccagctacttgggaggctgaggcaggagaatcgcttaaacacgggaggcagaggttggagtgagctgagatcgcgccattgcactccaacctgggcgacaagggcgaaacttcgtctcaaaaaataaaaataataatgtaatatatataataaaaccctgcctaaagtcatcagagaactaggagagaaggaggaattactgggccaagattcaggaagagacaggagggaagcctgacacctggggccatgtaatgtaaagggcgtctgacaattccagatgacgtggccgaggaactgagcagaacttcagacaaaagagtagttaaggaaaaaaggggagagtctagaactcaccaggctttgaattgaaacctcagggagctgccctgcaggtggaagggtgacccatgacaagtataccaaccctcacagggacagagccagctccagatggtctcagtccctgaaactggattaagatgattctggacacctagcaacccaggcacttgccagaaacaaaggcaaagaaactggagaggtttggccaggcacggtggctcacgcctgtaatcccagcactttgggaggccaaggcgggtggatcacaaggtcaggagattgaaaccatcctggctaacacggtgaaaccctgtctctactaaaaatacaaaaaatgagccgggtgtggtggcaggcgcctgtagtcccagctactcgggaggctgaggcaggagaatggcaggacagggaggtggagcttgtagtgagccgagatcgagccactgcactccagcctgggcgacagagtgagactccgtctcaaaaaaaaaaaaaaaaaaaaaaactggagaggttaacatcatcctaggtctctagttatttcttaatttttcacatacggcaaaacataactagggcacaagcatttcctgctgaaaaaaaaaaaaaaaagaaaaaaaaaacagaagcatttgacagaatcagtcccccgaaggctgaaatttggagttcttaaatgtggctgtgaatgtgcagtgcttaactatgttctaggagtgacacaagcctgagaaatttggcaaataattagaaaatataaacaggacaaatggaaattctaaaccaaaaaatacctcatatgaagaactcagtgactgtttaagagcaaaattagtgacctggagataggttagaagctgtgggtgggctgggcacggtggctcacgcctgcaatcccaacattttgggaggtggaggcaggtggatcacttgaggtcaggagttcgagaccagcctggccaacatggtgaaaccccatatctactaaaaatataaaaattagctggatgtgatggcgggggcctgtaattccagctacttgggaggctgaggtaggagaatccgcttagagtccaagaggtggaagttgcagtgagctgagatcacgccactgaactccagcctgggagacagagtgagactccatctcaaaaaaaaaaaaagacgatgtgggtagaatgcagcatgaagagacacaggatggagcaaaccaggtaggaggagacccagggatagaagtcctgagggtaagtggaccagcagaaaggaaaaggtcagagcagaagcaaggaatgactcccgtgtacatcagtgttcacagcaggattattcacactggccaaaaaggggagaggacccaagggtacaacagctggtgaaaggattaacaaaatgaggtatttccatacagtggaacactttagcaatccagaggaatgagctgacacatgctgcaacatggatgagccttgaaaacatggacatggccaggcgcagtggctcacgcctataatccgagcactttgagaggccgaggcattcagatcacttgaggtcaggagttcgagaccaacctggccaacatggtgaaaccctgtctctactaaaaatacaaaaattagccggatgtgcttgcttgaacctagaaggtggaggttgcagtgagccaagatcgtgccactgcacagagtgagactctgactcaaaaaaaaaagaaacatggaggccaggtggggtggctcatgcctgtaatcccagcactttgggaggctgaggcgagtggatcacaaggtcaagagatcaagaccatcctggccaacatggtgaaaccccatctctactaaaaatacaaaaaattagccgggcatggtggcgggtgcctgtagtcccagctacttgggaggctgaggcaggagaatcactcgaacctgggaggtggaggttgtcgttagccaagattgcaccactgcactccagctggcgacagagcaagactccatctcaaaaaaaaaaaaaaagaaaaagaaacatggacatgaaagaagccagatgcaaagggtgtgttatcacatgattccatttatatgaaatgtctagaaaaagcaaatttatagatacagagagcagattcatggttgtctggaagtggaaacagacggactacaaaaagtgcatgaggggccaggcacggtggcttacgcctgtaacctcagcgctttgggagcccaaggcaggcggatcacctgaagtcaggagtttgagactagcctggccaatatggtgaaaccccgtctctattaaaaatacaaaaattacacagtggctcacgcctgtaatcccagcacattgagaggctgaggtgagcagatcacttgaggtcaggagtatgagatcagcctggcaaacaaaggaaaaccctgtctctactaaaatacaaaaatcagctgggtgtggtggcgggcacctgtagtcccagctactcaggaggctgaggaaggagaattgcttgatcccaggaggtggaggttgcagtatgccgagatcacaccactgcagtccagcttgggcgacagagcgagactccctctcaggaaaaaaatatatatatacaaaaattagaccggtgtggcacacacggggctgtaattccagcaactcgggaggccaacgcataagaatcgcttaaacctgggaggcggaggttgcagtgagccaagatcgtgccactgcactccatcctgggtgacagagcgagactctgtctcaaaaggagtacatgaacgatctttggggatgatggaaacttaaatattggatcacggtgctggttgcacaattctgcaaatttaaaataactgaatcatatacttaaatgagtaaattttatgatatgtagattatacttcaatggttttcctaaacctactggccaattatcatgtcactgcttctcatgtccaagtccacccttcattacctgctctgcaatgaagaggtctcctttgcagtgggcatgttaagttctgtcaatagagacgctggagagacactgctggcggaaggccctggccttttgtccttgctctggctcaatggctgctagagacatgtgtggagacctgcccctaccgcacacctgtcacttcggccccagtggtgttatggtggccaccttgctgtggccgtccaggcatgggtaatgcacacctcacccttgtgccaccctgctggccagcaggttcccaacaccccaactcccaacgcatgcccgcccaccagcctcagcccacctgcacctcaaagggacttgcccagcccagtgagccagctctggccccggggcccagtgagtgctacctcccagtaggctgcactcacaccttctccagtgacttctcaatcccagccatggggattgggcccttctaagttttttcttcttgggtactcaccttcagccctagagcattctttagcactcacagtttctcttctcgtcgggttattctttatattaatcttttcctgtccaaattactctctatgtctcctgatcagtccttgactggaagcatcaagccttggattccagaagccttatgaacccccaggcaggataataaataagaagaatacaccaaagcacagcatgatgaagcttttgaaaactaaagagaaaaagaagtctttttttttttttttttgagatggagtcttgctctgtcacccaggctggagtgcagtggcgcgatctcggctcactgcaaactccgcctcctgaattcacgccattctcctgcctcagcctcctgagtagctgggactacaggcgcccgccaccacgcccggctaattttttgtatttttagtagagacggggtttcaccgtgttagccaggatggtctggatctcctgacctcgtgatccgcccgcctcggcctcccaaagtgctgggattacaggcgtgagccaccgcgcccggcctgagaaaaaggaatctttaagcaatcatacggggaaaaagggcccatcaccttcaaaggagccacaattagactcctcaacagacatgattgaggctggaagataagggaatggtatcttcttcaaagccgaaagaataggaccacgatccaaaattctacgctcactgaaaatacctttcaagaatgcaggtggccgggtgtggtggctcacgcctgtaatcccagcactttgggaggccgtggcaggtggatcatgaggtcaggagatcgagaccatcctggctaacacagtgaaatgccgtctctactaaaaatacaaaaaattagccaggcaaggtggcgggcgcctgtagtcccagctacttgggaggctgaagcaggagaatggcatgaacctgggaggccgatcttgcagtgagccaagatcgcgccactgcactccagcctgggccaaagtgcgagactccatctcaaaataaaaaaaaaaaaaagaatgcaggcaaaatcaagatattgtgagattaaaaaaacagaaaactcaccactggcagacctacactaagcaaagact

SEQ ID NO: 1166 - DNA, 5151 bp, Homo sapiens
gcggccgcgcggagcccgccatgccggcgcgggtctgaggcgtggcgagccagggccgaggcgagcggcgggcgcgccgcccctgtcgccccgcggcggcccggcccgggcccgatgagcggcggcctcggcctccggcgcagcccggaaatgtccggcaagatcgagaaagcagactctcagcgttctcatctctcttccttcaccatgaagctgatggacaaattccactcacccaaaatcaagagaacgccatcaaagaagggaaaaccagctgaggtgtccgtaaagattccagagaagcctgtgaacaaagaggcaacagacagatttctaccagagggctaccctctccccttggatctggagcagcaggcagtagaatttatgtccaccagtgctgtggcttccaggtctcaaaggcagaagaacctgagctggctggaggagaaagagaaggaagttgtcagtgccctgcgctactttaagaccattgtggacaaaatggcaattgataagaaggtactggagatgcttccagggtcagccagcaaggtgctggaggccatcttacccctggtgcagaacgatcctcgaattcagcacagctcagccctctcttcctgctatagccgagtgtaccaaagcctcgccaacctcattcgctggtctgaccaagtgatgctggaaggcgtgaactcagaagacaaggagatggtgacgactgtgaagggggtcatcaaggctgtgctggatggagtgaaggagctggtcaggctcaccatcgagaagcagggacgtccgtctccgacgagccccgtgaagcccagttcccctgccagcaagcctgatggcccagcagagctccccctgacagaccgcgaggtagagatcctaaacaagacgactgggatgtcacagtcaactgagctcctcccagatgccacggatgaagaggtcgcgccccccaagcctcctctgcctggcattcgggtggttgataatagtcctccaccagcattgccacccaagaaaagacagtcggcgccgtcccctacccgagtggctgtggtggcccccatgagccgagccaccagtggctccagtttgcctgttggaatcaataggcaggattttgatgttgactgttacgcacagaggcgactgtcaggaggcagccactcatatggtggagagtcgccccgcctctccccctgcagcagcataggcaagctcagcaagtcagacgagcagctgtcctctctggacagggacagtgggcagtgctcccggaacacaagctgtgaaacactagaccactatgatcccgactatgaattcctccagcaagacctctctaacgcagaccagatacctcagcagacggcctggaaccttagcccgttgccagagtctttgggggagtctgggtctccatttcttggccctcctttccagctgcctcttggcggccatccccagccagacggacctctggccccagggcagcagacagatacgccacctgctctccccgagaagaagcgcaggagcgcagcctcccagacggcggacggctctggctgcagggtgtcctacgagcggcatccctcgcagtatgacaacatctctggggaggacctgcagagcacagccccgatcccatccgtcccctacgcgccctttgctgctattctgccctttcagcatggaggttcctcagcccctgtcgaatttgtgggtgattttactgctcctgagtcaaccggtgacccagaaaaaccacctcctctaccagagaagaaaaacaaacacatgctggcctacatgcagttgctggaggactactcggagccgcagccctctatgttctaccagacgccacagaacgagcacatctaccagcagaagaacaagctcctcatggaggtatacggcttcagcgactccttcagtggggtggactccgtgcaggagctggccccgccgcccgccctaccccccaagcagcggcagctggagccaccggctgggaaagacggacatcccagagatccctcagcggtcagcggcgtccctgggaaggacagcagagacggcagtgagagggccccaaagtcaccagatgctctggagtcggctcagtcggaggaggaagtggacgagctgtccctcattgaccacaacgaaattatgtccaggctgacgctcaagcaggagggtgatgacgggccggacgtccgcggaggatctggggacatcttactggtccatgctactgagactgacaggaaagatttggtgttgtactgcgaggcattcctgaccacctacaggaccttcatctccccagaggagctcatcaagaagctgcaccggccacatggctatttctttaacccgtgctccacatatgagaaattctctccctttgccgacacattcaagaagcgcgtcagcaagaacacgttcttcgtgctggtacgggtggtggatgagctctgcctggtggagttgacagaagagatcctgaagctgctgatggaactggtcttccgcctggtgtgcaatggggagctgagcctggcccgtgtgctccggaagaacatcctggacaaggtggaccagaagaagctactcaggtgtgccacctccagccagcccctggcagcccggggggtagcagccaggccggggaccttgcacgactttcacagccatgagatagcggagcagctaacgctgctggatgctgagctcttctataaaatagagattcctgaggttttgctttgggcaaaagagcagaatgaggagaagagccccaacttgacccagttcacggagcacttcaacaacatgtcctactgggtccggtccataatcatgttacaggaaaaggcccaggacagggaacggctgctcttgaagttcatcaagatcatgaagcacttgcggaagctgaataacttcaactcctacttggccatcctctctgccctggactcggcgcccatccgcaggctggagtggcagaagcagacttcagagggcctggccgagtactgcacactgatcgacagctcgtcctccttccgagcctaccgggccgccctctcggaggtggaaccgccgtgcatcccgtacctggggctgatcctgcaggacctgaccttcgttcacctgggaaacccagactacatcgacgggaaagtgaacttctccaagcggtggcagcagttcaacatcctcgacagcatgcgctgcttccagcaggcgcactatgacatgcggaggaacgacgacattataaacttcttcaatgacttcagtgaccacctggctgaggaggccctatgggaactgtctctgaaaattaaacccaggaacataacaaggagaaaaacagaccgggaagagaagacctaggagcagacgccgggatccaggagaatgctcgaggggcgcagagggcagctcccagaccggagaggaccttggacctgttaggcgcatggcaggagtcccggcctcggagccatgaggctggccagccctcagcggggccgggcgggagctggagcctgccagccgcttcctgcctccttcctctgtgggagcagacccgtgggcctcagggcagccagcaggcaggtcttgttgccaatttacaaaccggtggttttctggtttggttttgttttctgcttttacttccatctctcccctcttgaccttccacccactcccctccagggagagagcagcagagacctcatcacagatgctgtttccatcctcctcgtcaaaaccattctcgctgctgagcttgacaatctgggcaaggcttgtggggcgcttgacaaacagaatctgccctgtgccgcctggttccgtggcctccagcatgagcctgcaggcagggcgctgcgggaacccagttgtgctgccccagcccatgcctccgggtctgctgtgcatgaatgagtgctcacttgtcccgggtttaggacgtggtcaagtgaacagcagggtctaactgtgcttacttagcccagttcaaacagaacaaaggaaaaatatagaaagcaacatctgttgatcatttaggtttttttttaaaccaccatgtcactttgagtccttcatgggtttttgaacagcatttatcaagaagaaaatgtgggctttttcccctctcccgtgttttgtttgtcctgtagatagagggaggaaagccgtgcagtggcaggcgggaccccctctggtggcgggaccccctcttgcggtggtcttgcggggccagccgggacctgtcactttattatttaaggagtgtgtgtgtagagtcgctggcttattaacagtattgtgtgtgggttgggtttttagtttgttccttctttttgaagtcccttcatttcaatccttgactctctctccccttcccttgcccagctctgttgaatgctgctgtgcgcgtgtgagggccgctctgcacacagggcccttgggttgtgtgaactgaaattctccctgtatttgtgagactcgcaggagtccccatctgtagcacaggcaatgccagtgccatgctgcagcctcagaaaccaggcctctcactccagcagcaggcagaaccgtgtctgtggtcgggtgctgtccacagctctgtctgccttgttcttgggcttgagctggatagaggtggggtctcttcaccttccctgaattcagaacagaccctgtgcctggccccagtgtgcccaggcaattccccaggccctcattgggagcccttggtgttctgagcagcagggcccaggcagcacatgagcagtgcccaggggctccctgcgtgaggacggcaaggtgcgatgtatgtctaacttattgatggcaggcagccccctgtgccccctaagcctggccctggttattgctgagctctgtgctcagtgctgcggcctggccgtggctcgtctgttcctttggggggcccgggcgggttgtgggaatcagtcttcacacctcacctgcaggtgtcggggtgggggggggcaaggaggggcaggcacacaccatgtctgacctgaacccgattctggggagcatcttcccgctccggccccacgacctccacagggttac

SEQ ID NO: 1167 - protein, 1096 aa, Homo sapiens
MSGGLGLRRSPEMSGKIEKADSQRSHLSSFTMKLMDKFHSPKIKRTPSKKGKPAEVSVKIPEKPVNKEATDRFLPEGYPLPLDLEQQAVEFMSTSAVASRSQRQKNLSWLEEKEKEVVSALRYFKTIVDKMAIDKKVLEMLPGSASKVLEAILPLVQNDPRIQHSSALSSCRVYQSLANLIRWSDQVMLEGVNSEDKEMVTTVKGVIKAVLDGVKELVRLTIEKQGRPSPTSPVKPSSPASKPDGPAELPLTDREVEILNKTTGMSQSTELLPDATDEEVAPPKPPLPGIRVVDNSPPPALPPKKRQSAPSPTRVAVVAPMSRATSGSSLPVGINRQDFDVDCYAQRRLSGGSHSYGGESPRLSPCSSIGKLSKSDEQLSSLDRDSGQCSRNTSCETLDHYDPDYEFLQQDLSNADQIPQQTAWNLSPLPESLGESGSPFLGPPFQLPLGGHPQPDGPLAPGQQTDTPPALPEKKRRSAASQTADGSGCRVSYERHPSQYDNISGEDLQSTAPIPSVPYAPFAAILPFQHGGSSAPVEFVGDFTAPESTGDPEKPPPLPEKKNKHMLAYMQLLEDYSEPQPSMFYQTPQNEHIYQQKNKLLMEVYGFSDSFSGVDSVQELAPPPALPPKQRQLEPPAGKDGHPRDPSAVSGVPGKDSRDGSAPKSPDALESAQSEEEVDELSLIDHNEIMSRLTLKQEGDDGPDVRGGSGDILLVHATETDRKDLVLYCEAFLTYTFISPEELIKKLHRPHGYFFNPCSTYEKFSPFADTFKKRVSKNTFFVLVRVVDELCLVELTEEILKLLMELVFRLVCNGELSLARVLRKNILDKVDQKKLLRCATSSQPLARVAARPGTLHDFHSHEIAEQLTLLDAELFYKIEIPEVLLWAKEQNEEKSPNLTQFTEHFNNMSYWVRSIIMLQEKAQDRERLLLKFIKIMKHLRKLNNFNSYLAILSALDSAPIRRLEWQKQTSEGLAEYCTLIDSSSSFRAYRAALSEVEPPCIPYLGLILQDLTFVHLGNPDYIDGKVNFSKRWQQFNILDSMRCFQQAHYDMRRNDDIINFFNDFSDHLAEEALWELSLKIKPRNITRRKTDREEKT

SEQ ID NO: 1168 - DNA, 6085 bp, Homo sapiens
ccttttctgggcaccgccttctgctagggggttgtagatgaaagtgcctgctcccagagaagcttgtctaacctagcacagtttctaagctacccaggctgccagaccgagcgaccgtgctgccatggacacagactctcagcgttctcatctctcttccttcaccatgaagctgatggacaaattccactcacccaaaatcaagagaacgccatcaaagaagggaaaaccagctgaggtgtccgtaaagattccagagaagcctgtgaacaaagaggcaacagacagatttctaccagagggctaccctctccccttggatctggagcagcaggcagtagaatttatgtccaccagtgctgtggcttccaggtctcaaaggcagaagaacctgagctggctggaggagaaagagaaggaagttgtcagtgccctgcgctactttaagaccattgtggacaaaatggcaattgataagaaggtactggagatgcttccagggtcagccagcaaggtgctggaggccatcttacccctggtgcagaacgatcctcgaattcagcacagctcagccctctcttcctgctatagccgagtgtaccaaagcctcgccaacctcattcgctggtctgaccaagtgatgctggaaggcgtgaactcagaagacaaggagatggtgacgactgtgaagggggtcatcaaggctgtgctggatggagtgaaggagctggtcaggctcaccatcgagaagcagggacgtccgtctccgacgagccccgtgaagcccagttcccctgccagcaagcctgatggcccagcagagctccccctgacagaccgcgaggtagagatcctaaacaagacgactgggatgtcacagtcaactgagctcctcccagatgccacggatgaagaggtcgcgccccccaagcctcctctgcctggcattcgggtggttgataatagtcctccaccagcattgccacccaagaaaagacagtcggcgccgtcccctacccgagtggctgtggtggcccccatgagccgagccaccagtggctccagtttgcctgttggaatcaataggcaggattttgatgttgactgttacgcacagaggcgactgtcaggaggcagccactcatatggtggagagtcgccccgcctctccccctgcagcagcataggcaagctcagcaagtcagacgagcagctgtcctctctggacagggacagtgggcagtgctcccggaacacaagctgtgaaacactagaccactatgatcccgactatgaattcctccagcaagacctctctaacgcagaccagatacctcagcagacggcctggaaccttagcccgttgccagagtctttgggggagtctgggtctccatttcttggccctcctttccagctgcctcttggcggccatccccagccagacggacctctggccccagggcagcagacagatacgccacctgctctccccgagaagaagcgcaggagcgcagcctcccagacggcggacggctctggctgcagggtgtcctacgagcggcatccctcgcagtatgacaacatctctggggaggacctgcagagcacagccccgatcccatccgtcccctacgcgccctttgctgctattctgccctttcagcatggaggttcctcagcccctgtcgaatttgtgggtgattttactgctcctgagtcaaccggtgacccagaaaaaccacctcctctaccagagaagaaaaacaaacacatgctggcctacatgcagttgctggaggactactcggagccgcagccctctatgttctaccagacgccacagaacgagcacatctaccagcagaagaacaagctcctcatggaggtatacggcttcagcgactccttcagtggggtggactccgtgcaggagctggccccgccgcccgccctaccccccaagcagcggcagctggagccaccggctgggaaagacggacatcccagagatccctcagcggtcagcggcgtccctgggaaggacagcagagacggcagtgagagggccccaaagtcaccagatgctctggagtcggctcagtcggaggaggaagtggacgagctgtccctcattgaccacaacgaaattatgtccaggctgacgctcaagcaggagggtgatgacgggccggacgtccgcggaggatctggggacatcttactggtccatgctactgagactgacaggaaagatttggtgttgtactgcgaggcattcctgaccacctacaggaccttcatctccccagaggagctcatcaagaagctgcactccacatatgagaaattctctccctttgccgacacattcaagaagcgcgtcagcaagaacacgttcttcgtgctggtacgggtggtggatgagctctgcctggtggagttgacagaagagatcctgaagctgctgatggaactggtcttccgcctggtgtgcaatggggagctgagcctggcccgtgtgctccggaagaacatcctggacaaggtggaccagaagaagctactcaggtgtgccacctccagccagcccctggcagcccggggggtagcagccaggccggggaccttgcacgactttcacagccatgagatagcggagcagctaacgctgctggatgctgagctcttctataaaatagagattcctgaggttttgctttgggcaaaagagcagaatgaggagaagagccccaacttgacccagttcacggagcacttcaacaacatgtcctactgggtccggtccataatcatgttacaggaaaaggcccaggacagggaacggctgctcttgaagttcatcaagatcatgaagcacttgcggaagctgaataacttcaactcctacttggccatcctctctgccctggactcggcgcccatccgcaggctggagtggcagaagcagacttcagagggcctggccgagtactgcacactgatcgacagctcgtcctccttccgagcctaccgggccgccctctcggaggtggaaccgccgtgcatcccgtacctggggctgatcctgcaggacctgaccttcgttcacctgggaaacccagactacatcgacgggaaagtgaacttctccaagcggtggcagcagttcaacatcctcgacagcatgcgctgcttccagcaggcgcactatgacatgcggaggaacgacgacattataaacttcttcaatgacttcagtgaccacctggctgaggaggccctatgggaactgtctctgaaaattaaacccaggaacataacaaggagaaaaacagaccgggaagagaagacctaggagcagacgccgggatccaggagaatgctcgaggggcgcagagggcagctcccagaccggagaggaccttggacctgttaggcgcatggcaggagtcccggcctcggagccatgaggctggccagccctcagcggggccgggcgggagctggagcctgccagccgcttcctgcctccttcctctgtgggagcagacccgtgggcctcagggcagccagcaggcaggtcttgttgccaatttacaaaccggtggttttctggtttggttttgttttctgcttttacttccatctctcccctcttgaccttccacccactcccctccagggagagagcagcagagacctcatcagcagaccaaggaagtggtgggtgctccccctccctaagctccagggtccctgaatcttctgaaatctcaaatgagtggaggcctcctggggtggcctgtcctgcaggggccctggaatgggggcaagcagctgggtgggcagaatgcagagtagactcgggggaggatcctttcactttccgcttccccttctgatgcatggaggatggtgtgagcttttcagcaggcccggaaaggtacgcaggtgacgccttagcagccccgcagctggtgctctgccccgcggtactggcgccatcagggcctcccttgcccgcctgagagcagcagcagtctctgtcatcccgtcgccccttaccccccaccccaggccactgggcccctcccacaccacctggggagctgagaagaggaggctggagtaagggaggacttgatcatccaagaaatactttttattgctgggagtcttctgaacctcaccaaactgaggccagagctgagctcctgggggagttaattcagaggggagaggccagcacctccctcctccattgctcgctgtgtgccttaaactccatctcatgtccctccccatcccctggctttccctccctccttgccccatcctgggccagccagcagggctcctcctctggctcttcagacctttcagccagtgctgtcagtgcccctgggagggaagggcatccctgaggcacccgaatggtccctcagggtgcagggaggcagaagcctggccacagaggagcctcctaaggcagcagctgcagcaagcgcaccctctccccactctccccacgccagagcggcttccagagcagatgctgtttccatcctcctcgtcaaaaccattctcgctgctgagcttgacaatctgggcaaggcttgtggggcgcttgacaaacagaatctgccctgtgccgcctggttccgtggcctccagcatgagcctgcaggcagggcgctgcgggaacccagttgtgctgccccagcccatgcctccgggtctgctgtgcatgaatgagtgctcacttgtcccgggtttaggacgtggtcaagtgaacagcagggtctaactgtgcttacttagcccagttcaaacagaacaaaggaaaaatatagaaagcaacatctgttgatcatttaggtttttttttaaaccaccatgtcactttgagtccttcatgggtttttgaacagcatttatcaagaagaaaatgtgggctttttcccctctcccgtgttttgtttgtcctgtagatagagggaggaaagccgtgcagtggcaggcgggaccccctctggtggcgggaccccctcttgcggtggtcttgcggggccagccgggacctgtcactttattatttaaggagtgtgtgtgtagagtcgctggcttattaacagtattgtgtgtgggttgggtttttagtttgttccttctttttgaagtcccttcatttcaatccttgactctctctccccttcccttgcccagctctgttgaatgctgctgtgcgcgtgtgagggccgctctgcacacagggcccttgggttgtgtgaactgaaattctccctgtatttgtgagactcgcaggagtccccatctgtagcacaggcaatgccagtgccatgctgcagcctcagaaaccaggcctctcactccagcagcaggcagaaccgtgtctgtggtcgggtgctgtccacagctctgtctgccttgttcttgggcttgagctggatagaggtggggtctcttcaccttccctgaattcagaacagaccctgtgcctggccccagtgtgcccaggcaattccccaggccctcattgggagcccttggtgttctgagcagcagggcccaggcagcacatgagcagtgcccaggggctccctgcgtgaggacggcaaggtgcgatgtatgtctaacttattgatggcaggcagccccctgtgccccctaagcctggccctggttattgctgagctctgtgctcagtgctgcggcctggccgtggctcgtctgttcctttggggggcccgggcgggttgtgggaatcagtcttcacagacagacgtgagccaggcggaggactcgttccttgcagaggtcagtcctcacctgcaggtgtcggggtgggggggggcaaggaggggcaggcacacaccatgtctgacctgaacccgattctggggagcatcttcccgctccggccccacgacctccacagggttacattgtaatatatatgccccagctaacctgtctgatggtggcatcttcctgcagacatttcaaacatgtaacttttatatgaaaaaaaataaacacagatgaaagctgcccaatgcca

SEQ ID NO: 1169 - protein, 1069 aa, Homo sapiens
MDTDSQRSHLSSFTMKLMDKFHSPKIKRTPSKKGKPAEVSVKIPEKPVNKEATDRFLPEGYPLPLDLEQQAVEFMSTSAVASRSQRQKNLSWLEEKEKEVVSALRYFKTIVDKMAIDKKVLEMLPGSASKVLEAILPLVQNDPRIQHSSALSSCRVYQSLANLIRWSDQVMLEGVNSEDKEMVTTVKGVIKAVLDGVKELVRLTIEKQGRPSPTSPVKPSSPASKPDGPAELPLTDREVEILNKTTGMSQSTELLPDATDEEVAPPKPPLPGIRVVDNSPPPALPPKKRQSAPSPTRVAVVAPMSRATSGSSLPVGINRQDFDVDCYAQRRLSGGSHSYGGESPRLSPCSSIGKLSKSDEQLSSLDRDSGQCSRNTSCETLDHYDPDYEFLQQDLSNADQIPQQTAWNLSPLPESLGESGSPFLGPPFQLPLGGHPQPDGPLAPGQQTDTPPALPEKKRRSAASQTADGSGCRVSYERHPSQYDNISGEDLQSTAPIPSVPYAPFAAILPFQHGGSSAPVEFVGDFTAPESTGDPEKPPPLPEKKNKHMLAYMQLLEDYSEPQPSMFYQTPQNEHIYQQKNKLLMEVYGFSDSFSGVDSVQELAPPPALPPKQRQLEPPAGKDGHPRDPSAVSGVPGKDSRDGSAPKSPDALESAQSEEEVDELSLIDHNEIMSRLTLKQEGDDGPDVRGGSGDILLVHATETDRKDLVLYCEAFLTYTFISPEELIKKLHSTYEKFSPFADTFKKRVSKNTFFVLVRVVDELCLVELTEEILKLLMELVFRLVCNGELSLARVLRKNILDKVDQKKLLRCATSSQPLARVAARPGTLHDFHSHEIAEQLTLLDAELFYKIEIPEVLLWAKEQNEEKSPNLTQFTEHFNNMSYWVRSIIMLQEKAQDRERLLLKFIKIMKHLRKLNNFNSYLAILSALDSAPIRRLEWQKQTSEGLAEYCTLIDSSSSFRAYRAALSEVEPPCIPYLGLILQDLTFVHLGNPDYIDGKVNFSKRWQQFNILDSMRCFQQAHYDMRRNDDIINFFNDFSDHLAEEALWELSLKIKPRNITRRKTDREEKT

SEQ ID NO: 1170 - DNA, 98147 bp, Mus musculus
  misc_feature (1)...(98147): n = A, C, G or T/U
gatcagatttccattttagggtatttcgtcccatgatcctctagaaaatcccacaagggaggctggtgtctataccacgatacagcaatattatgtatgacgtctggtctttcgagcatacataccctatgttagtgtgtgtgtgtgtgttgggggttgggggtgtgggttcccttgtacagcaggaagcaggaacaaccaggctggagtaactagaatatttacccacaaaggagcactgtggctatcaggacagtatatcacatggtagaattttcctcgtggctaattcttgcctacctggtatcaggagaagttttttggctcttccagagacaacagctaagacgacaggaccccttgggctggggagggtgtcaagggttcctcaagggttcagtcagccctttctagagagtcactgggctctgcagggagagctgtggcttctaatctaatggcagttcgtgcttgtgattttcagagaaatacatggagtttgacctgaataatgaaggcgagattggtgagtgaggccttggtggtggagaaggaggatgggaaggaggcctgagagccaaagaatcctgctgctctggggaggagcactgggtgaagctgaagaacacccagatgcatgaggccctgatggtcctggtggccaagctgcttgactctagcagcaggagacaccagggagtgacttccactagggggcagcaggagacactggggagtgacttccactggggagagacttccactgtggggtgggggtggtgggactgggatcttggttcacacagcaaaagacaactttagaatgaattgttactatttatttacacctttgtatgtagtgtgtgtgtttgaacatgggtgtttgtgtgtgggtggtatgtgttaggacaatgtacaggaatctgttctcttctaccatgtaggttctggggtttggggatcaagcaggttgtcaatcttggtggcagataccttcacctactgagatgtcatttcagccgtgggccccttcctttcttccctcccccttcctttcctccctcctcccctccctcttttcctttttttttttttttgagacaagttcttgctatgtagttgtgtctggcctgcaattcatggagacccacctgcctgtagatgtgccttccgacattgccccctcctctgaatgtctgtgtttgaatccaggttaaaaccttttaatacactccaaattcagttcattaaaaataaaaagggtgacttagtgatcaagggggcttgctgctctggcagacaacctagattcattttctcgcaccccacgtggtggctcacaacccccagtgactagttccaaaggatctattgctctcttctggactccgagggcactatgcacatagcgcacataaaaaccctcatacacacaaaaataaatacatctttaaacaatttttagcttggtggtggtagtgtgtgtcttaagtgcactcgggaggcagaggaaagcagatctcttgagttcaaggccagcctggtctacagagtgagttccaggacagccagggctacacagagaaaccctgtcttgacaaacaaaagggaagaaagaaagaaagagagagagagagagagagagagagagagagagagagagagagagagagagagagaaggaaggaaggaaggaaggaaggaaggaaggaaggaaggaaggaaggaaggaaggaaggaagaatatgggagggctggagagatggctcagtaattaaaagtgtgtactgctcttacagaggacctgagttcggttcccagagccagcatcaggtggcattcaaacaacagtaactccagcttctggagtctccgccttctgatggccttggtgggcactgcactcatgtgcacacacacacacacacacacacacacacacacacaatcttaaaaactacaataaaaaatagtaaggaaaaaggacagatatggaagaattatagttagagagagagaagagaggagaaagagagagagagactgaaacttatacaaaacaaaaactaccaagaaggctgggtttgagtagcttaataattgctatctatatgattttggtggcttaatcaatgtctacgtttaaaagattaagtaacaatgtttttgcattcttcttatctgaagaatgtgtctttctgtaggtgagattttacagggtttttgcagacttttcagactaaaaagagaaaattgtaggtcacaaaggtcagcgggattcttaccatgcgcaggtcactaggaggtcgatactcgttctgactgtaaacagggctcaggatcttgtctgggagtcttttctcagaacagacaacagggtgtgctggtatggttagcttcagaggccacacagctggccagctgttccatggctcttgttaggaatcttccaaggacggaaatagtgtctcagcaggctgtcttcacagcattttttcttttgttagttgggttaagattcttgactcgttgccagtaagggacttaagggccgaagggctcctcgccctccctgtaccccttcatcctttacctttctgtcctgccaaaagccaagcccactccaggtccttccatctcttggcctagctctactgcctggggatcctcatggtacctcccttctggattccccagcctcccatcccagagcctagactcccttccaaccaggcctgcagatgctgcttgactcctaaccaaggagctactgcctcattctcccgggtctgttttgtgcttgctgttgtcctgtagtgacaaggagtgtagacagtgactgcctctcacccccagtagaacacactgcttcctgccatcaaggcattgttggggtgacaaaggcacagaagaccaggtaggatgctcttgaccagcagggccaagccatggtccaggctgctcagacacccccagtttgcggatggaaaaccaagacgactcagagaagtgaaaggctttggtgggctgctgatgttaagatgtgggctcaggctcagcctttgcttctaaacgaggtctctgttaccctgcccctaccctggatattccattggatccaaatgtactcagccaacacttgaacagctactgccatttagaagtttagattttagatgatttcatggttttgtttttgttttgagaaaggactcatgttagtctagtctcccaagtgtggagattacaggagtgcaccagcaggctaactttatacagggcagagatggaacccaggactgcatgcatgctaggcaaacctaccaactgagctacatctttgtgtgtgtgtgtgtgtgtgtgtgtgtgtgtgtgtgtgtgtgtgnnnnnnnnnnnnnnnnnnnnnnnnnnnnnnnnnnnnnnnnnnnnnnnnnnnnnnnnnnnnnnnnnnnnnnnnnnnnnnnnnnnnnnnnnnnnnnnnnnnnnnnnnnnnnnnnnnnnnnnnnnnnnnnnnnnnnnnnnnnnnnnnnnnnnnnnnnnnnnnnnnnnnnnnnnnnnnnnnacatttattatttatttgttcatggagggaggggctgctccactatggcaagtgtttgacagagggacaaccagagggagtcagcccctcctatacccctcgggctccagggatcaaactcagtaccaacctccggcttggctgcagacacctttccccatctggctgagctatcttgccagcatgttattttaactgttattgattggctcgtggccaccatctctttagatggatctggtgccctcaccaatgagagaggcacagtgggccagggcactcggaagctccctaccacgtgtcctccaggaggtcttgccagtgtgaaatctggtgggcagcgcgtgaaccctgtgaaccttaccacagagaagcctggacaagccctgcagcttcgagtcttgtgcaagtgtggcccacctcaggcctgctcacagtcctaggacctggccttgcccactctcttttgcttatccattgttcactgtgaacaatccccaggaaatagccccagaaggaggtgggagccctgaggtcaggcgggggctctggggtggggtgactttttttggtacctcccttatttttcttcgattttgttccttttgttgcatttcctgctctgagggataattttggctccctgtcccatctcccctagggagagagtcttagaacagctgagtggaagtggcaggtggcaatggtctccatcgtggtgtgccagagaaagttggactttcaatgcctggggtcaggctaagtccaaggcaccttggctaacccagaacacctgctgggaaagcatctcatttatggcatctcttgagcctaaaaaccaaccatttcttcttttttcttttccattcaaactgattgtgtgtgtgtgtgtgtgggggggggggtacacatgtacatgtgcgcctgcctgtgtatggctgtgtgtagagggtagagatcagcacctgtgtatgtgtggctgtgtgtagaggtcagcacccggggtctttccaattgctcttccctttagttttttgcttactgatttgactaggctggatcctcttgtcagtctcccaagccccacgatggcaggcttgtgccagtgcctgaatatttgcttgagttctggggcattgagctcagttcctcctgcttgcagtacaagccccttacggactgagctgtctccctaggccttcctcattatgtagcccaggttggcctaaaacgtgcagtggtccttctacctcagcctttaaactgctggaattatagacatgtgtcacccatcatcccacagagctgaagcagtcctccccaggacccccagtcaagaacagcaaagtttgagtccagcccgtctgactcagaagcccaggtgccacctgctggcctttactgcctctgaggaaagcaagggaggtctcatccctccctccccagggagtcaccattgctgctgtctatagggagagatggtcactgagaattgtgtgtgcagctgtgaggcatccctggctccctccagggcctcagggtcctgtctccactcaacagatctacttttcctcctggcagatctgatgtctttaaagaggatgatggagaagctgggggtccccaagacccacctggagatgaagaagatgatctcggaggtgacagggggtgtcagtgacaccatctcctaccgagactttgtgaatatgatgctgggcaagcggtcggctgtcctcaagctgtgagtacctcttcactccatggggtctcagaggcaaggacaccctgtgtgagtcagcggtcctcaggctgtgagtccctcttcaccccatggggtctcagtggcaaggacatcctgtggggagaggccccgggctcagggcaccttacccatcccctagttggtggacggttagtggtgctacctgttgcatgaggagcttgggttttctgggcctgttttccttaggagagattagcatggcaaccccaagattggggacttccccatcaatgaccaaaatgatggtagcaccaaatgtccttttttgcttccttccttccttccttccttccttccttccttccttctttcctttcctttcctttcctttcctttcctttcctttcctttcctttcctttcctttctttctcttccttccttcgttcgttccttcgttcgttcgttcgttcgttccttccttccttcctctctctctctctctctctctctctctctctttctttctttctctctctttttgagatgtgctccctttgttatgcatgtggtcttgtctggcctggaactctctatgtagaccaggatggcctggaacttacagagatctatctgcctctgcctcccaagtgctgggattaaaggtgtgggccagcatggctggccaatggtgactttttaaaagatctgatgggggttggggggttagctcagtagtagagcacttgcctagcaaacgcaaggcgttgtgtttgttcctcagctctgagggaaaaaaaaatctgatggtattttggggcagaactctggcccagcccacccttctccagacaccttgggtagggaaggcatatggcctagcagctgtaggcttagagggttgtactttcttccaccttggactggctgagcagttggggttggggagtcccacttctattttgtgcctggtttttcttctgtgacttaggatcaccaacccgccccttccacacagctagcccaggggcattctgttgaggacgctgcagagggaaggctggggagctttctgtgtgaggggaggagtcttgaccctttcatttccttcatctccaaaccagggtcatgatgtttgaaggaaaagccaacgagagcagcccgaagccagctggcccacctccagagcgagacatcgccagcctgccttgaggacccacccggaccttccgggctgccatccctgcccctgcctctccctctgcgctctgccatcttgactcattgtgttaggtctcctgggttatgccccagtggactcattttttttttttctctatgtaagcacatgttacctgacttaatgaggctgggaatcccgagcctcaggcccctctgctccctgctgctctgccctctttgtacaaaagggctaacatcaaaccaaaaactggagagggcagggaggctgcaaacctcgttcccatgtttgaagagggcctgtccgtcagttcatctttctcagcttctaaattaaattcaggctgcaagctgctctcggaagatccagagcaggcacagagctccagggctccctagtgtcttagggacatgcttccagtgccgctggaccttctagcagcggctactcagtggctagacacacaactgattcccttttgttcttgcccttgtccattctcagcgacatgacgcaaggtggggaggaaagaacaacctttgggtacttcagaggaaccagaaggaaccgctcctttacagacagctcagagggacagtgtaatggcactgtcccttgctagagcagtagaggggtttggaggcagaggtgaggtcagtggtgtgagggagtcctactttcagggtggatgctgagggcaccagggtagaagtggagtcaagtgttgaacctcaaacagagaacaggctgtctgattgcacagtgccccaatccggctatttactgtcctgccctactctcccctcccttcactccctcagttatttatcgagtgtgtattacaagctttaagttctcttgctttgtctccatgtgtgctatgtccaactcctagctcccttttcaaatccctcaagtcctggagcttggggattagatggaggtaacatggcagattttagctgggccagtccttccatttcactgctggcctccaggggttaagtgccttgctgaaggttggtgggggctatcagagagtgtggactggagacccgctctaggctgcattggtcaaaggaaagggtagagagcagcatttcccagcctgatacttgaggaaggtgtggtctccacggaacaccttgggtcaggactcaccctcctgagggcctccaggttggcagtgagatttcagtaagcaccaagcctagctttgcagattgtcttccttacagcttcctgactggtcttcagagaccatttccaagaattcatgcagcaaagtatcaaatgtcttacccgagtggggaacctcagccttgaccctgcttgtgttctggaaccatttactctgggcactcaggacgagacagtcactcatcacacatatttatcaagcacctgctcaatgacacgagtccagaacccggcagtgaaatggactgatgtatgaaatttatgtctactggggaatcactcccagccaatctagccaatgactatgatatggagtgggggggagtgcaagaggtgagtaccatgtagtcccagggattccagctgggctcataatttggcaagtgtcagaggagcctctgtaaaaccttaagtggaaaagacagggaagcgttgagctaatgtgcttttcctgtggctcttgttccacagtccaatacccagggtgctgttcccacagcagtgagagagagagagagtgaagcaaacagggcatggaatggttagctccagttcgtcctctggtctcaaccagttcagttcaggagagagatcatttcgctatgactggctgattttcagccctaggagctgcttcaaatgcacagtctagttgaagtttaaaccccagcattcctccctataaatataaaatcctgtctaccctcaccccatcctttgacttatttttcttttaagattagcatctctgcccccatttcctcctgccttccttctctgagcgggctgggaccttggactgcattgggtccctattctatgtgacagaggaaggaagaatcagccggctcagtgggtccacaactcatgagcttacacaccacctccataaaggagtgtgccactgacctctgcagagcacagaaagaggcagtggtctgaagatcaatctatgggaagacttaagaatgaccctttaatggaggagttggcatatatttcaagttgtgtctgttggttccagggtttttaacctctctagttaagggcttagctttcttgggacatcggctgccttatttctgaaaaagaccaaatgtaactggtgtaaccagcagtttggggattgccaagtatggctttgccctgtgactcaaaagatgtttgtaaggtagatttgggtgagtgccattattgtgtgcatgtgtgtatgtatggatgggatgtggtctcctgcagactgaaataaactagagcaatttatcagtgtctttgtgtttcttggggacagctctgggctcagtaaattcagaagagctagctgacaacaggtaccaagtaaatgagtgtgtcctgggtctcccatgtcccagacagacagttgacgtcatctgattaagcccaagacccaggtctactgttagcattttacaatgaatagaggcttgcacacatgcaacttgttgagagactgcatctgacagaatgtgccctctggagctgacccaccagctccaagttaggaacctcttttataattctactccagaaatgtcttcaacatcagtcagtatacgcagatctgaatcttaacccttcctggctgaaagctattggataatttaactgctttgtgtggaattctcttattacatatttttttccagacagggtcccatgtaactcaggatatctagagattgctatgtagcctaggaagaccttgaattcctgaccctctaatccccaaaagctgagatgatagccgcgcaccatttgcgatgtgaagtggatatggcttatgatctgaaacgattgccttgaaaacagtaaacaaaaccgatcttttgtcccttttcctctccgtttttaaaagggttctgcaccggcacacagtgcagtccacccgctaaccgaacctctctgtccgctcttcccagcaaaaaagttcctaacttctctaagtcggaagcttctaagagccctgcaggtaagtgctaccgggaagcatcgagagtctcaggaaggccgagcgtgcctctctctaaggaagaaaattaaatagcgaggctgcgcacgcagcatccaaaggaaggcggactccggcccgcgcctcatggccacacccactgcgcggaaccggccaatggggccttgtggattggcaagcgcgcgacttccgagcagccctcgactgcctccgagcacactaaaaaccggcctgggtgacgtcagtcacgcgcgccggaaacgcgcatctaccacgcgccgcgggcgctgagggaaggaagttgaggcctgagcggcctgagctgtgtttgaaaggccgcgggtggcagcggcagcgccagcagcagctacttgaacaccctgaaggcggcacgatgggagacgagatggatgccatgatccctgagcgggagatgaaggttagagcctggccggggcctccccgcctgcgtagtcctggagttgccttggagcctcgcctctgccggctgctcctgcagttcgcagggtcgcgatcgctcgccccacagagcgtccgcagctctgcgtgtcgcgggcctgagttccctgcaagtgcaggtacctgtccttgcgtgggtttgtccacgccttctgagttaccccaggtactctgatgggctggtcgccttactggtgacagcgattcttgtttattgagtgagacgtactgtcgccaccgtcgctgcagcccttacgaccagcttagaaagaggagcgcattgaagccttgaaagcaaatgatccaaagtcacgtggcaaaagccttacatctctcttacgatttaggcatggtctcttgtagctcaaggtggcttctggtcttgggctcttgtctctgcctccacctcccaagtggtgggattattggtgtgcattaccacagttggcttagacgctcagttcttattagctctctatacttgagggtggtccaaactacctaaagtggagccaagaaacactatctgccttcaaaacccctagttagtaggaacaggaagtcaagtttggcactggaaatcagcttgaactcatgagactaaaggaaaagcaagcgaaccctaagtgatccccatgctacaacttctggatactgtgttaatagttggcttatatactctgacagaatggaaaggcaggggaccgtagacagttggaaatgagtgagttgcaggaaggtgttagccatttgtgtgaccggtgagtcgctaaaatgcacatgggtcgagtgctccatatcatgcttagaaacagtggctcttccttgagtcagcacatgtgctgagcccggtaatgggcaagcttcatgttcctcagatatgttcgggtagagaatttagaaccacagggctaatagcagtattttaattcctgccaaaagcagaaaggagaggtttgggttttgggtttgtctgttgtgtttgttttgttttgttttgttttgtttcttttgtgttgcttcatcacactggcccaccacaaaaaaagccaccaagccccagtggtacagtcatgactattaggatgataatatcaaaaaagatagatgatttgtttctttatgaatggccagtgtggcctcatggggaaatttgtgtgaacttttacccaccgtattcaactgggattaagagtactgctcttccagagctcctgagtccaattcccaacacctacagggcagcacacaattgtctgtagctctaattctcacacagacacatgcaggcagaacaccaatgctcataaaaatcttccagtaaatatgtattaaacatggactgcaagaaaattagtatgtgtgggtgtgctagacaccctttatgaagcatttcataaggttctgtagaaatacattttctcttgtagctgtcatattcttttcactaaaatccctagctggagagttaggaggtgtggtggaggatacagatagagcttaacaaagtgattacagattaacactttttgagggtattagatccccaggaactggagttacagacagttgtgagctgctatgtgggttctgggaattgaacctagatcccctgaaagagcagccagtgttcttaaccattgcttcctctctccagccctctctatttatttcattcagcaaatgttaatgagtattataccaagcaccaccaaatacagagtctaaaaacaaaattggtggcctcaaggtaataagtatatttttgttatcctgaaattgcatttatggactatgataatagacatgatttaatttcttccttgatcttgtttcctattctaaaacaggactttcagtttagagcactgaagaaagtgaggatctttgactctcctgaagagttgcccaaggagcgctcgagtgtgcttaccatatccaataagtatggtatgctcttcgctggtggcaccaatggcttgaatgtttttcctactaaaagccttcttatccaaaataaacctggagatgatcccaataaaattggtaagcacgttctttgatttatagtgtgcagcagagccagggctgcagtagcatactagtcagtgtatttccttactaagacacgattctgatgtcaaaattgtgatttcttttggccttgcagggagcttccacttagggtgccaaaggcctttctgagttttcttttcagctctctgctattgtttctgtgagccacttctctaagatgagagggaagaagaccttactgttgtgctcagttgaacgtgggctctgggaagccatccagaagaaggcatggctgtatcaccctgcagacggaaacgtgtgtctgcagcattgagcagaagtgttttcagcaagggccatagcaagagtcttgggatatttaaagcagcattacctatgtacaggagagttaagcttagttcctgtaactagatatccaaggtattgttactctgtatccatcgtgcatcaggaggaagtggggagagtgcaccagtgggctggtgagacagcaaaatcttctatgttaatacacataagcagagttgctgatgatcaagactgccagacaagaactccaggagtcttgttccttctggcagctctgattggggactgaatcagcagggtttataagcataaaaaaatgtaagcaactgggacaagttacagttacagttttcaccagtcaggactctgggattagggactctcccaagtgtttcattgttgtcagctgacattgagtgtaagtgtttttgctcaaccaatcaaatttgtctgttctttctgttaggaacaacattatgttttggggaactattgttgcttagagagggagttggtgagcttgtagagagtcctcagttccccagggcctaggaacttgaactttgttcatccaataggaaaaatggagtctgaatgtagaatgtcagtccttaagaccagctctttatctatgcccaacaggtgtatttttatataggtgaaaatgtgggtttgtattgacttgagtaaaggattatgactgtgtgcctgttacatgctgtatttttctgctttgtgtttttatagttgacacaattcaaggcttgaatgttcctatgaaattcccagtccatcacctagcactgagctgtgatagtcttacactctctgcctgcatgatgtctagtgaatacggctccattatagctttttttgatgttcgcacattttcaaatcaggtaagctactatatggaagcagagacttgctcgtagacgttctaacttggaagctgtataaagggtgacgtggctgctccatggtctggtaagggggtattcattgtagctataagaaagcaaacactagaggaacttggaagagtccagagcagagaaagaagtagactgaacatggccagcagagtgaatatagccagggctctggggacgaggggagatggagaatagaaacaacgccgtgaggcaggctatgaggagagtgagtagctggaggagggacgctcatgagctgtaggggaaaaagtatggactctgaagtgtgtggcaggcacttgtgatactgaaggagcctgagtgctccatgtcacgctgatagactgtgtcccttcagaggtaagggctaggactcctgggagattggaattagctcacaagttctcaaggaaggctggcttttatctgataaccagcagtactcctatagtacagtctgacctcaattctgcatatataagactgtcttttggagtttggggaattggagctaactttggacctaaaagataaatctcaggttaacatgtgaagtttttctggattacaatagaggttacaaaaatgctccttaaatacagaatacagactcataagctgttttagtaaattataatccttcctgtaccaagttaacatttctcatttacacacaaggctatcaagtgacgagacttcttagagatttgctttgtgagaaaccatggcgctaatggagagggtcaagggtctgcttgcttgcttgcttgcttgaggctctcctgatgttggattctttgatccaggcaggctattgagaagcagtatagaacactggctagctgcttgggattagctaccccccccccccccccaatagggtttctctgacgctctggcttttctggaactcactctgtagaccaggctgacctcgaactcagaaatctgcctgcctctgcctcccgagtgctgggattaaaggcgtgcgccaccaatgcccagcttggatctgcttcttaataacctgagctaggctttttgatttctttctttggtttttggtggggtgaattttattccgttttttgaaacaagttctggtttacatagcctggcctggctttaagctcactctttttctgctccagtctatggactactggcgtgtgccagcatgcttggccagtgttaacctctttgaaatctgcctttccagctgtaaaatgaagacaactgtctctactataggtagcatggagaaaaacaagccatacaaacagctaatcccagccgagtgtggtggcacactcctttaatcccagcactcgggaggcagaggcaggtggttctgagttcgaggccagcctggtctacagagtgagttccaggacagccagggctacacagagaaaccctgtctcgaaaagccaaaaaaaaaaaaaaaaaaaaaaaaaaaaacccagatccaagaatttagtgttctctcagctatttattgactcttttatttgcatatccctgccagcagtccccctgtggtggaatacttaacagccatttctaagtttcattgaattgtttgtaacaaatagattggtatggagacttggttatgaagaaatatagagctgggtttaagaaagaatgcatatttagtcatttcctctgaatcctaaatgcctttgtatttattaatttattaatttattttgcatttttctcttattttaacaggctaaaccattgaaacgtccatttacctatcacaaggtttcaaacgatgccagcggaatggtgaatgatatgaagtggaaccccactgtcccttccatggtggcagtttgtctggctgatggcagtatttctgtcttgcaagttacagatgtggtgaaagtatgcgccacacttcctccttccacaggagtcacatgtggtgggtaataaaggcttcccacccataaagtacgggcatggcaggcaattaaaaatttatttttggaagtaaagtggaaggcttttaattttgtgtggactgctggggaaggggagtgggtagaaattgagaatattctttatatctatagttagtggtcttgaagcccaacagcatgcatgagttcgtttgaatgtgttggggctattgagataaaaaatattttggcacagctcatttaaaactggatttttgagaataattgtttctaagtctaaaagagtggccatctgaaagccatttgtaccccgtgtaaagcactagaagtaacaaatgggaacaacacagtgattccttgaccctttaaagacctccactctccttgtcttgcaaaatttttctggaaaagcattcttggctctcagttaatggcctgggatgaagtcctaatttgcttgtcttgctaagatggttgtactctctctgctctgcctggggacggtctcctggccttccatggtggtggtggtggtggtggtggtggtggtggtgtagctgtctagatcttggggctcgctttcttttctttggtttttttaattggcagcattttctttccagtatgctggagccccaaaggaaagcagctggcagtaggaaagcagaatggaactgtggtccagtaccttcctgtgagtgactgctctgcactggagaactcttcctacttcaccactcgtgggggtggtttgggaacatctttgtgacttcttttcttttttggtattaataagcagtttgtgattaggaatgcctgtgttagagtgcttgcctagcatgtgtggggccttctgttcaatccttagcagtacacaataagtaaaaagttatttatagtcatcatactgagtctctctgtgaatggagaagatggaccccctttgttctgtccctcagtgtgtccctccagagttgccactgttgtgtgtagtctggtctcctccctttcatggacgctcatgcagatcacccatgtggacatgcactgttcctggttttcctttaaagttaaatgtggcccttcactatgctgtatttctttcacttcacaatcagtttattttctcctttaaaaagaaagaagttttaatcctaccatttagaaaccatgatattttagtagaaaaatttctagtccctcctcttccttccactctatctttttgagatgtgatctcagtatgtgtccagttcatcttcaaatttagtcctgccttcgcctcctaagtgctaggccactgcagtgtgcgatgggtgtttgtttgtttgtttgtttttttgagacagggtttctctgtatagtcctggctgtcctggaattcactctatagaccagggtgaccttgaactcagagatccatgcctctgcctcctgagtgctggattaaaggtgtctcatcactgtttcagccttgttggggggttcttaacatcaagaaatgttaaaataaaacagcaggaggtatttcccctcacagctgtgctctgttacttggctttgttggcagtcttccatgtctgaaggagatgggttccatcgagcagcttagagagaggagtgcatgaggttaatggacagtttgtggttttcagtgtgggcaacaaacagaacagatgctcctgctcctgcatcctctcctctccttatgttttgttttgttttaatgagacagggtcccattgtgtagaccagggtaggcttgaactcacagaggtctgcctgcctctggattgctgggtgtatgcaccattatgcccaggggcaacacacacacgcattttatggtcctgagtgttttgtgtgcatgtatgtatgtgaaccacatgcatgcattgtacctttggaagttggaagagagcattagatctcctggaacttaggaatggttgggagccaccatgtgggtttggggaatcaaactcaggtcctttgcaagagcagcaagaactcttaacctatgagcctctttagcaactgggagtgtaggcaaccacttttgcttgttgttgtcaaacattgttatgtgaagttgagtgcagactcttttgggtggtattagcatctaaaatgataacgcagtttattgacttatattgttttgctttttcctaatttgattgtttgtttgtttgtttgtttgttttgagacaaggtctctatttaatcttgtctgtcctggaacttgctgtgtagaccagtctggcctccaactcacagagatctgcttgcctcttgtctccatggttgggctagaattaaagatatgggtccccaggtctgaccttccccttttatttttaacaacttagtagactgaggtcatctttccagctctgtgtgaggagcaactctctcttcagtggctccatagtagcctactgtgtagaagggcccgtatgctcttactgatggtcatgcatcagcactactagctgtggcactgtgagtgctgctgcactgagccttctcgtcagttgcatctgaaggggtctgggcatttccctgggtaggctgctgggaaatgatgctgttcttctcttggggggcttggggtggaggcgggaggatggagcacctgtttctaggggctctgattggattggattgttttgctggctgaagcattattgtttcctttgacatttctcaaatctctttcagactttgcaggaaaaaaaggtcattccatgtcctccattttatgagtcagatcatcctgtcagaggtaacaactgctttgcttattctctggactctactgcagccattctagccatgtgagatcctctgtccctactcaggagagtgtgggagccagtctcacacttaatgtgagttatttagttatttagcttgaaatggatcttacatttttacaagaattcctcaccatttccctagtaataatcctgtagagaacccactacttttaagaaattgggccaattaattgttgcatctgtgaattattgttattcatcacaggatagacctttggtaaagccatagtactttgttttatttgattggttggttgttttttgtttgtttgtttctttctttttttcttttccctaggtagctcttgtagcacatggtggctattccaaatgaatgctgctttttgcttgctgacattggttatttaggaattagggatgtgtgtctttcagttctggatgtgctatggattggtacatatgtcttcacgatagtctatgctggtgcagatggaaccttggagacctgtccagatgtggtgatggctctactcccggtaagcatgtgaaagattatcttgttttctggactcacagaagtcttgtactcatgctgcttagaactaaattcctttccttagtagctgtgatggtagactcaggggtaaggtttcaatgttacaccattgtcctggaaccaaaaatctggtgtccatttataaagtatttatttgggggcttgcttacacagttttacaggattagtccatgatcatcatagcttacaggtatggcactggagcagtagctgagaacttgacatcctgagtggagcagcagatagcgaaagagacacttggcccagtgtgggcttttgaaatcttacaaccccccacccagtggctcacctccaacaaagccatacctcttaatccttcccaaacagttccattaactgggggaccaagcattcaagcatatgaacctatgggggccactcattcaatccaccaaaagaatgattgaattatgaagttttaaaaaaatggataaaatgtgtttacttatgctgtaatttagaaaagcaaggaaataacttgatttttaaaaattatttatttcatgtgaatgagtgtttgcctgaatgtattatatgtgtattttgtgtgtgcccagtgcccacagaggtcggaaattgtcatgagattctcagaaactggactgtgattgtaagccaccatttaggtgctaggaacttaacccaagtcctcttgggtttagaccagtaagtgctctaaactactgagctgcctctccagctcctatcttatttttagtattcatttatttatcaaatatctaagagatgcaggaagtatgtggggcactgctttaaagctgagcatacagaggtgaccaggtcaaagtcctggcttttaaggatcctacatgctgacaagtggggtagttgataatttgtagtcagaaagaaatggggtttgggggtggagagaggaaagcagacagggcaggtgatgactagggcagccattgcagacagggtcagtgaaggctttcccgaaggcttctgctgagcagaactaagtggagcccacgggtgaagaacaacaacatgagctacaaagcgttgccaagctgagggcattgaaagtagaggatgctgagcttgccttttcctgttggagttcggctgctttgctgtgcctgagatggggtcttacactagccaggctgtggtctgtttagcctcagatgcacactgtctttatgcctcagctcctgagagttggaattacaagtgagcttctgtgccagcttcaaaatccataaaattatttagaaatgtttagtatagaagaagacagctactaaggccatctctttttttgggggagggggtgagggaatttcaaaacagaatttctctgtgtagccctggcagtcctggaactcattctatagaacatgctgtcctcaaactcattgagatctgcctgcctcttcttcccaggtgttggtatgcttcactgtctcccagtaagcaagaaacaacttgctgttttagtatataaatttccaactctctgcttccattttcttggagacaggcttactgtatgtataatccgattggtcctcaaactcttaactcttgctgcctctgcctctaagtgcttggtcaggaaatatcaaagtaaaacagaaggaaggagaactgcttccctcgagatgatggatactattatcacatccctcacaccctccaataactgttacaagaattctgcagcccacacagctatagaaaccccatactccatgagctctgcactcttgcttgtcagtgtgtccctttctcatgctctggatgatgtcagagcaggacctggcagatgtccttcagattgtaatgtaagacctgagtcctgaccacccagttgttttggagaatcatgttgtgacagatgatggtgagcctgctttgaattgctaggatccttctataaagtctttcctgtactctgttaaccaaacgatgtttgtggttggatagcattgaggccaagttgcaagctctcaaggctacttgcaaacccctggaagagaatctagacctggtcactaacatacagcacagtcccatccaggtccccatggtggctggttccccacttggctactgcaacaatgtgctatgcgctgttcctgagtgttgttagaacaccattgtgataaggtgccaggtcaggatgacagccatgatgaagatggggagagcagatcagagagcagtcactctgtgtttaactgaggccagctgggaagccagaacattggaagcaacatcacacttgccaccctgaactctgaggaagactataccaatgacacctggctggacgatgagattaatcctgaggtgcaggtccactgtgccatcatcccctccgatatgctgcacatcagcacaaacttgcacagaagagaagatgacactaactgctggactaccttgaggtgcagcttgtgaggccagggcaaacataggaagcagcagctggaccccctcactatctatggcctcatctataaatttggaatcatggaattggacctgtatcaggtcaattagaacactgactctgagtaccatacaacctggcagtggaagtagcgaggccagagcttggtggttaagagcttctcttggaggacaccatcctcatcctcatagtgcctcagagaccatgataggcacccctctacctaccagagagctactacagtcatagccacaggtgtgacgctacatgttggccaacgcacagtaaatgcagatctaccagattggagaggttgcccaggttccttaaggggagcaggtacagatcacacaggacagtgagggcatactgcagattcatcatgttggtcaggatggatagtcatggggactgtgccagaatctcattcctgtcagtggtgactcagtggctggggtaaccgctctcagctttggcctgtgagaggggacaagcttgatctacctggcctgctagaaatgagatgatccaggtactacagggtgctcatcataaccatggcttcttcagaccctgctgctacaggaatagacaggttgcagctgcagggcagtgacactcaagtttagtacatccagctggtgccccacagctgtagcgcaaatgggcctagcaacccattctgcaactggaaatgcagcttgaacgtggagccatctagatctagtgaatcttgcttcagcaagcacctgtgggttctgcagggcagctggaagctcctggggaaaggtcctggtcaccccctgctagaagatgcctcaggatttgagtctcactgctggtctccagaagagaagcttatcttggagcatgttgagtacattcagaaagacaacaactatgataactttgtttaaacagctttttaaaacttgtgatggtgtttataacaaaaacaaaaatggagagagaaaaaacccaaaccaagcaagcaagcaaacaaacaacaacagagcagaaacacaactgtggagtagcagaagcctggctgtgtgctccctcagggttgtgacgtaggtgttggagccagctgatggtgctggagcactctggacctgctgctagggtgctccccagtgtgcttgtgcagttctaataaaataaagtgtatttatgacgaaacaaaaaacagaagcaaccctttctgtttctggcttctttagaaacctctgacatttgtcagctgcttgctctatagaggagagatgtggctcttgctgtccatgtttcagctttcttcctctttaaggagagatccttttgtgtctgttgggtgatgattatgtatatttttttagtatatatattgaaaagtgaaatctctaggtcttttgtattgtttttgatgctgaagatttaatctgtgccatagacacacaaggattctgtcatgttatgtttttagcccttccttggttttctgaggtaggatcttgccccaggatatttcagtttgtccgtgaacttaaaattagtttgcctctgcctcccaactgctgggactctatgcatgttctgctgtgcccaggtgatgtgcccttccttctttgatgagctttatagaaagcttgtgtctcaggaaggttgtgccagggttcctattcaccactgccagggctccctgctcaggctttagtgtgtgtgtccacatttacaccgagccagtatgtgaggaggtgtctcgacggttttcttttcttttccttttcttttctttccctttccctttctgtctgtctgtctgtctgtctgtctgtcttttttggagacaggatcatctcatactgaactgggaatcactttgtagtgcaagatggccttaaattttcaacaatcctgcttcagcctcccaggtgctaggattataagaattatataggattataagactgttgtagtaactcttgggtgtctgctgaggttcagtttaaaattacatttatcgagatgtcttctcataatcttagtaagtcttttcgatgggagtacaaaagtactggctaactcctgatggatgctttctgtggtggaccaagaatggtcagtcagtgaaggattcttcacagcccctcagataggctctgaggaaggtgagaaaaccatgtgacatacaggctgagtgagtcacccctgtgtgtcctagagcagaacatgacagaatacagttcctattcagttgactggtggttgggtttctgttccttatgttacccagtgcaccttcagagctcatccctatgtgtgtgcacagacttttgtatccagtttctggtgacacttgagcgatttttgccttgagattatgagctatgtagaggccaaagaagctgcacatatgattcccttctcttgtttatagaaaaaagaagaaaagcatccagaaatatttgtgaacttcatggagccctgctacagcagctgcacagagagacaacatcattactacctcagctacatcgaggagtggtgagcagagccttcctctctcactgtcaggccacacacctcagtcactgacgtcagtgttgacttgttcaggagagggaagtacaggctgagaagccctcagtgtgacgagtggatgggtagtaatgttctttggctagggaggcaacttcccaaccctcacttgtttgtactcaatgtgtattagtcttgaaaagtctaatacatgtgtctcaatattagtctgtactcactgtgtagtctgggctggccttcaactcatagaagtctgcctgcctctgcctccagggatgggactgccaccacacccagttccacaaagtccaattttctcaaccacagtgagtgattccaatgaaaatactgattttgtttatttgtttgctttgaaaaagtcatctgtagctcagagtacccttaaatttacaggcctcctgcctcagccttctgagtgctgggattacagccgtcagctgtcacacctggctaacagatactgatacttaaggaactcatttaaggtttctccgagagcagcctttggaagtccatggaagcctctccttttgagctgggtttccctgtgtgggccagggttcttgttgcaagccccaaccaggttctgtgtgtctccctagtctttgcgtgggtagtagtgggcaggtttactaaggttttttcaaactaaaaagctcagcaccacctctagcaccttccattctcttaccagcccagtaccggcactgcagacccagtcaggttcaggctgctgaggagcttgaacgtaatggccttttggttttgtttttaagggatttagtgctggcagcatctgcagcttctacagaagttagcatccttgctcgacaaaatgatcaggtaaattactcctgttttcttactttgatgttgaatgatgtttttgtttttgtttttgtttttgtttttttgagagaggtaactggttaagactaatgagggcgggttcctttcaatgagcttttagtgcaaatactaaatgacagcaataactttcttccttccttccctctcccctcctatatggatgtttttactcggggttggggattgaacccagagctttgtgcaaatatgccaagtactttaccaaccttgagctacactcccaaccttggtatcttttcttgttacacttgtcgcatcaacataatgcctttctggctgttgtctccgtctttctgtttgcaattctcacactgccactgtctgcgtgctggcctgcaaaggttatcagatcctttggttttgtttgcagatttatttaagagttagagtcagcttggtttgcagccctgggactgcactttctttacttggcacagtcatgtatgttagtgtctgctcttctgggcctcaacagcttctgttctctagcttcattacttgtctcctgttcccttctgactcatgcttcccggtaggtcaagacagaaggctaggcagaatgagtcttaagaatcaggaatcatttgttggatggaatggagcccagccaggaaaacaaggagcaagaagggagttacttgatagatatagaagcttcttatggggtgtaagcagctggccagtgtgaggcatgaggaagaaaggacctaagtttgccttctgtctcagcaagtagtgacacaggcacctgcagagtgtagctgttgaaccaccttgtcattgtccttaggaactgccaggttatgggaggcacctacaaggcagggatgggtacaccaggtgctgataaagtagactcactcaaccactcacaggctggggcacttgtggcttctagatgttgcaggtgtcagaggctccttcctcatcggctcaggaagctgaagcaagcgcaccatgtgttctttggtgattgattgaatggtgctgagaagaagcagtgtaaaaccctaagccacacatgtttctgtcatgtctcccccctagactaattgggaatcttggctgctggaggactctagtcgagctgaactgcctgtgacagacaagagtgatgactccttgcccatgggtgttgccatagattataccaatgaagtggaagtcaccatcagtgagtgttgcctagtgtgtgctgtagtaatagctgtgctctaatggttgatacttagaagctattagtacatctctatctacagagtagtgggaggttcgtcatgacagtgcaaagctacccaaagatggggactcattgccgacaccgcagccagatacactcatgtgcactgacttgaggatggagcagttgaatttcaagacatagtttctgcccattcggtgccctagtgacctcacaagtgtcattgtcagctggcagtgcacccaaacctaggttaagagaaggatgagggggtagtgctctaagcttctgttttccacatgggacctgcacatgctctctgagtacgccttcccctgtggaggttagcagtgtggccacagtgacagatgtcatgaggcagctgaagaagctctgcctgctggagcttcactctgcagagctgtcctactcagacaccattgaccctgtcctttccctggtttggtaggcacatttggtctgatgagcttgtattctttttctcttgtgtacttatgattcaactgggaatgagtataaagtagcttaactctgtgtgtgtgtgtgtgtgtgtgtgtgtgtgtgtaagagccatcttgtcatttctgtaccaaacccatcattgcctagagactcctagcttgtcagggtagtgttgaacctgcctccggaacagaggagcttgggagagtccagggcttagagtgtccaacagggcccagcaggatgtggtgatctgatagtgataagagctcttgatgcagctgctgttgcaagaatcacttgagtacctctcatgcagggcagcctgcccttcaggttgtgcccggaaactgatgaggttctcttatcagctctgttctttttttttacagatgaagaaaagactcttccgcctgctccggttctcctgttactttcaacagatggtgtgctttgtccattttatatgatcaaccaaaatcctggggttaggtccctaatcaagaccttggaactgatctcaacagaaggagagcgacagcctaagtcctcaggtgtgtgcctctgactcctttggcaacccatgagcatctccggggatggtgacttagatgtatgtagtcacctacacacagtcagtttactgcaggaaggtcttggctgatcttgtcctggaacctatgtgcacgcacatctttacctcacttagtccccaggcccattctccaatccttactgcacatgtcagagaaaggaaagtcagccatgttgatccaagctctgttgaatgacctgttttaaagaactgtttaatcgtgggagttagtcaagcagatgattgttcacagacagtttaaaataactgaaaaatgtttattgacagcaaggaagtagaaagatgtgtcaagaagggccactgtgtgtcatgtgttgcttctctaaaaaagagtccacatacagaaacactggaagggggctgttaaactctagtggctctttctggctaagaggaatatggagactttagtgtttgatttctatttcattggcttttgatttgttttccccctcctcttttagaatattgtcaggtaatatctgtattgcagaaaagttagaaaatccaagaacgggtttcatagaccatcaagaaataacatagtctgtattttgggatggaatcaactgatcctttcttccgtggataaatgcccacagtgtctctagttccacctaagcactgctgcccgttttgggggagggggggtatggctggttatgcttggtgatgctttcatgctgctctgtaaggcagagtgactcatgcgtcatggatgctggcatacgttgccagagctataccaaatttcggttatggggggtggggaagggggtttgtaccttatgttctctcctgagactttccatgagcacctacacccagcttcagtctgtagtgagcagggctgcccatcgggccgacactggtggctggttgtttctgagcacaatgtcccaccattgagtgcctgagcacagccatgggtggcgactgttagctttttctagagacccttctccttccttttcatctagtgcagaggtaacagctgtcccctggttagtgaacatgggagatagtctgtcctgggacctgccctgaatggctaaggcaaagtcagcgctttggaagaagacattagtggttctctctgttcccacatagcagctccaagactgtggtgtagattggccagtagtagcagggtgagggtctccaaatactccattctaatcgtccttggaagagtggctacaatttctttaggatgtggcctcagcttttccttctggtctaatcctaatgggtgtggtagtggtttatgtctacatgtttctctgaagtctttgtctcttgctagttccatagctattgtgtagaagaggtagctgagtaacctagagagtagccttagttattcttctagaagtgacaggatgtcagaaggtggtgatttcactcttgtgtcctctccaggctcttgaagataagatgtccatctctcatgaacaccaactgccatcttagcctaatagccaaggccaactaatgtaaattggaagtacacttatttttttaaagtatttatttatgtagttgaattgatattaggaagttgggaaagtagaacaaattctaaccctgcctttttggggagctgtctgcccgtgtttctgcatgatcaccttaaacttaaatgtggacatcattgaaatgttgattttatttatttatatgttttgatactggtcctggctggcctggaactcatggacatcagtctgtctgccttctgagtgatgggagcaaagttgtgcaatgctgtgccccacctgagatgttgattttgaatttaagctgtaaactttgttttatgttcttagctaattttcatggtctacaataattgactttttttttttaaatagatagggtttctctgtgtatctcttactgtcctggaacttactttgtagaccaggctggtctcaaactcacagaaatccgcctgcttctgcctccccagtgctaggattaaagacgtgcaccaccactgccacttgtttctgcttttttgaggcagtctctcacagtgtagttttggctggcctggagctctctgtagaccaggatggccttaattcaaaagatttgcctgcctctgctaggagtattagaacataaggcatatgctatcatgcttggctaagtttacatgtctttgattctagagattggatttttttcctctgaattaggctctctgcttacatttgttagccttgacttttaagtatgactgactactttggttaaaacctagatcctttgcctcagttattttatctcatctaagtattttttaggaggtctttgacttcatcatttttgacatttttaaatagatgaagtggttgcactctcagactcaactcttcgagagagctgaatgaaaggctttcatttataggaccctatctttaattcatttggagttgcttttaaatagtgttttgaggcagagccctgaacggttattttctggttaatgaagtactgcagaatgaggttgaggcctcgctctttagagtttgcagtatgcaggcttattgcgctttccatccaccaagtcctattagcctggtgcctttcgttccacacgttgtctgtcttgagagtttcacgtgtggtatcctgtggaacccctgccacggaaagaccaactctacccactctttgttttccttccttcctcctttctttctttctttctttctttctttctttctttctttctttctttcttttttttttttggtttttcgagacagggtttctctgtgtagccctggctgtcctggaactcactttgtagaccaggatggcctcgaactcagaaatccgcctgcctctgcctcccaagtgctgggattaaaggcatgcaccaccaccgccctgctccactctttgttttctttaccggcaccatttgcagcccctctgtcctccctcccttatcttctgtcatgtggagcccccgggttacagtttacatttgtccttttgtttctccttggttctcgttacaggaagttttcctggtacttcatctttccctaaagctccacaaaacctggaagctccagaaacatcctcttcggatcttccacctgcgtacgctgctcacacttacaccttcgctatgccctatgattcacgaagcccttctgtggtctcctttggcccttcatgcatcaagtcttctgcttctgtcaccggggagcccccactgtaccccactggatccgacagctcccagagcagcaccaggctctggcacctccactttctcttttgctcctccttccaaaggctccctggcgtcgacccctgcagtggctcctgtggccacatctgctgctcccttcacttttggttttaagcccaccttggaaagcacacctatgtccagtaccccaaacacagggatgaagccttcgttccctccctcggcctcttcggtgaaagtcaacctgaatgagaagtaagtcaccttgaaaggccgacttttcggaagactgggtccaatagtgcatggtggtcagtgagctagtcactcgagggcagtactgaacagtccttctgaagtagcacttaacagtgggaaacgagccaatgggaaggctgtgtctgctctgcagcggagtccagagtgactcttaaagggcttcagctctctgactgttagaagttcacactaagtagttgtctcactttctcagcctataaagatagcaggtgttgcttattttaagaaggaagctgcccagagcatgcagcctgggaaggaaatcggacttttgtagttttttcctctcatagctactcttgactatcaactgttttctgtgcggccaacaaggtgacttgagcagttagagacacatgaggtcactctcctgcttgccggtcggtcccctaaggtttcttgttgcgcgtttctttacaattcaaaccttttagtgtgggatctagtttcctccagatctagttccagtcatcccgctcatcctttatttatttacctcttggtctttttctgttctcccaataaactgagcgtggagagggagtgttcccctgtattgtacagccttttccagttgcagtgggtgtcagaaccttcagtttgggggtctgcttgcctcattgccaggatgtcctcctgcagccaaactgtcattgctcagatgagatccacatgtggctacttcattttatttattttttaagatttacttatttattatatgtaagtacactgtagctgtcttcagacttcccagaagagggcatcagatctcaatactgaggatggctgtgagccaccatgtgcttgctgggatttgaactcaggaccgtcagaggagcagtcagtactcttaactgctgagccatctctccagccccgagccacttcttggtatttcattttgttgggctgcttgttctttaactgagcttgtctacattggtggagctgacttgacattcttactaggtcatggtgtcccagagacagtgacttgcttgcttccctggtgttctcacagcccagaaacaatcatcctcaaaactcattctcttgctttgttgcaccacccccttaaaacacacatacacacatacaaacgcacacgcacccacgtacacacgcacccccatgtgacagggtagaaaatagatgcctcctgcactgagtgcttcggctgtgctgcagttgatgagtaggtggtaactgtgccctcacaagagtaagcagcacgtgtgctggtctgaaagcagagatggcttgtcagtttttcttggctatcactgctcacgcctggtgggaaagaagcctctaacagactgttgtgacagaactgcatttccgtttttaggttcaccgctgtggcctcctctgcacctgttcatagctccacgagcacaccctccgtgttgccgttctcctcctccccgaagccaacggcttctggaccactcagccatcctacgcctctcccagcatcatccagctccatgcctttgaagtcttcggtctctccctcgccagcaggtaataatctctgaagcacacacgcctttttagatgggtgggttcagcaggttaagagtccttgctaatgtcgtgaggggaggtttttttatttttgttttatgagatagggtttctctgtgtagccttatctgtcctagaactcattctgtagaccaggctgacctcgaactcagagatctacctgcctctgcctcctagtggataaatggtgtgcaccaccacaactaccatctggctaagttttttatttgtttgttagtttgtgtgcttgtatgcttgaatattttaatgtgctgtggttgtggtgctctgacttagtgattcacggtgggttcagatctgctagcctttacttagagatcatggaaattcaaagaaagtgtctcgccctcacataagctggttatgacctaggtgctcgccctcacataagctggttactgagctgcccttcagcatggaggacaggagcagccctcggggagacttgcgcttactgctcccgacactgtggagtacagtttcccattagccactctgaacatgtgatgaaatgggaatagttatagacaggatccaaggcttccgagacaccagccctgccttcctgtcacatgtcttccaacctggttgcaaaagtataaatactgtgctcggttggcaccaaggcgcagtgaatcctaatagtttacatttttgcttatctctttcttccttttatgtaaaaatttgaaaatatttgagagttagttgcagacattgggaaacacttgtcctcgagctagatacatgggtgcctataacctaaaagccaaggctattacactcaagagtcaccagtcaactctagagtccctgacatatttctccagtggtctgacagctgggttgtttgttttgttttgtttttcctctctttttctgttcatctcattagcatagacaagaaaatccccagcttagtggttttgggaccatccctgttagggttggattgtttccacatgatagaattcaggttgaagatttggggcggtcacaccacatgggagatgttcttcaccaagcatgctgttcctcaggccgactgtaaaactgtttgagtttgggcttgtgagggcttttgctgtctgtcttttcctatgtggatgtgcatgcgtgtgagtgcagttacttgggtaaatcagaggtgctcgatcccctagaattggagttacaggcaggagcctaaagagaccttgatcttaaatcctccctgcctgagcctcctgagtgctgggagtgtaggtgtgcttcaccaggcccagtttggtcatccttctttaatgcagatggtaaaagtggagccagggacagtgtccgctgtaagccactgacactattgctcctttgctctagctggccgctccactcagactgcgccaagttcagcaccctccacagggcagaaatcacccagggtaaaccctccagtgccaaagtcaggttcttctcaggtaagttgaaatttccttgatacacttgaatgttactaacatggcctttgtgctttagaattcagacatggaaacagtaattataactataggagacactgaagtcaacatgtacttataaaagcaattacctatttactttctttttccagacatggtctcactatgtagtcctagctgacctggaatttactctgtagacaaggaggctggccttgaactcgagagatcctttgcctcctgagtgctgggattaaaggcatgtagtaccatgcccaacctttattcagttttttgttttgttttttaatttatttattgtatgtataagagtacactatcttcacacacaacagaagaaagcatcagatcctattacagatggttgtgagccacctcacaggccctctggaagagccttcagtgctcttaaccactaagccatctctccaaacccctctacttagcttttttaattcaaagtaatttatttagaaagaagttcatggcctagagagatggttcagaggtcctgagttcaatttccagcaaccacatggtggctcataaccacctataatgagatctgacgccctcttctggccatggtgatagatcattgtatacataatgaataaacaaatcttaaaaaaaaaaaaaagagtccatgtggtatgtgtacagctcagttgtcatcaactagtataccttggaaaccagcaaataatttgacaaaggaagcattaccaagatctcagggctattcctttcgagccctggctttaggtcttcatccttgccaagaatcattcactcttttgttatctaacagtatgcagattaatttagcagatttattgatttctatcagtagattgaacatgtagttttactatgttcctgatgtctgtttcgtctctgttgctgtctggagtagatgatttattgtgggtactgctgagtagtttccagctaaagctatcctgagtagcattgcccggtcagtgtggttgatgtcttctagtgaatatatgtgcacctttctttggggtttaagcttagtcattggatggctggaccacagacttggacatgtcccttagcaaattgtcacccatggttgacactttcatcctgtcctcagtttttccaggtttggtattttcatcttacattgtatttgggtttttttgttttgtttttgtttttatttaactcattttcctagtgattagcaaaattgagttttgtttcattttaattttagccatctgtgttttttttttttttatatagtctcttaatgttcttaacatttttctgctggttggtgctagtttgatttctgttgctgtgataaaacactaaccgaagtgccaggctgtggtgtcacataccgttaatcccagcacttgtgaggcagagccaattccaggacagccagggcttcatagagaaatcctgtctcaaaaacccaaaacaagggctgaagagatggctcagtggttaacagcaccaactgctcttccgaaagtcctgagttcaaatcccaacaaccacatggtgactcacaaccaccgtataatcttatgccctcttctggtgtgtctgaagacagctacattgtacttacatataataataaataaatctaaaacaaaaaacaaacaaacaaacaaaaaacccaaaacaaaaaacatacaagaaagtctgtagatttaggggaggaaagggtttatgggtttcccattcaaggtcacagtccattattgaggaatcaaggcaggctcacttattgttccacacagcaccacctctgaccagggaactaacttcacagacaaagaagtacagtggcaccatggaggatgctgcttgctggctggctctcagccgtgcttgtccttagcttccttatacggttcataccacccacctatggctactagtgccgtagtagactgggccctccttccccagacaatccccacagacatattcacaggccagtttgaactaggtagttcttcagtttaggctttcctctcaggtaactcttaggctccatcctgacaattaaagctaactgatggtcttaactgatctttcatgtgtgttgcatacaggattgactctagggttttgtgcatgtttaacatgcactctaccactgatctgtgccatatgtagttcttcagagagacacaaacacacaagaaagcatatacagaacactctctttgtattacctatttgtataagatctttatttttaatataactgaatgatttttatttttaacttttattttgcagctctgagattgaactagatagggaactacctatcattgagatataatgccaacctagttcttgtgtgttacaataagtgcttttcacgtaatgctttttagaattgcatttattagtgtgtatggtatgtgcacgtgagtgtgatgaggtcagtgaagacttgggtgtccctctctgtcacttgcttcaatgtgtcaaagtatctcactgattcctgaaactaggtaggcagccagtatgctccagagagcctcttgtcttttccacctaagctctgggctctgtgcacccctggtcacacccagctttttatgtagggaaaggcatttgaactcaggtcctcatgctcacacaacaagcattcttactcactgagccatctccccagcttctcatgacttgttttaggaatcattgccaatttcaaattcaggaagattttcctatgctgtctacagctttgaaacttacttgtatttaagtcagtagccatcacctcagcttgttcttgaggttttaaggttctgtcagtttcccacttgaacattccaggagcaggagtcctgctttttcctgttgtacctcccatcctgggtccttccatcccagcacacattcgtgctttgttagtttatagcacaatgcccagcttatgggcatctgctaggtggctgctgtttggtgactgctcatgcagtctaaaaccatgtcaggacccatcagattttcccagcccttgcccagcactgacaaaccagggctttgcataagcgcaggaacaaaagtacgcccccaccccccacccccgcccccaggtccacttgcttcactcacagtacttcttcctattccaggtcatgtcagtcatgtgtcctatatcttggtttatcattacatgtctttgtcaggctgtggctgtcacttgcctcttggagtcctgactgctgtaccttttttttttttttttataatttttttattaggtatcttcctcgtttacatttccaatgctatcccaaaagtcccccatacccacccacgcccactgccctaccgacccactccccctttttggccctggcattcccctgtactggggcatataaagtttgcaagtccatgggcctctctttccagtgatggctgactaggccatcttttgatacatatgcagctagagacaagagctccggggtactggttagttcatgttgttgttccacctatagggttgcagttccctttagctccttgggtactttctctagctcctccattgggggccgtgtgacccatccaatagctgactgtgagcatccacttctgtgtttgctaggccccggcatagtctcacaagagacagctatatctgggtcctttcagcaaaatcttgctagtgtatgcaatggtgtcagcgtttggaagctgattatgggatggatccctggatatggcaatcactagatggtgcatcctttcgtcacagctccaaattttgtctctgtaactccttgctgtacctttttttttttttttggcttttatctctcactgttatccctctcctttaaatagcaaaagggatttttgtttttgttttgttttttttattgataaatcatatttcattcaaacccttgtgcaataccagcagtagttttcgaacagtgtacagtagaatctgaattctttggtctgtccttggacacttgctcagcctgcttctctgacccctttctctgtttttcctaccccactcagctccattaagcaagcccacgtgacttggacattccggtgtatttcctccttatgtcctttgtgcttgctcttgctgcctggaagatgtttacctcagctctgccagcagccttctctcacagcttgttcctgttcaggtctctgagggagaactttgttggctgttttgagctgctcattcttcagttttacctgttattcgccagtagaaatggtcagtaggtttacttcttactgtcttgtccctgaagaagtttcctgagtaaggatgtcataactggctcatggttttcaccgtgtagaatgaatgcatcctctacaaattggagacccagtgcacacggttcagaagagtggtgacccacagtgcatgagtgctccctgtgatggcccaatggggttgcaactacaaactagagatgaccgtgtggagctcctcctgatgcttttgccttccatttcaggccaaggcacttcagcctcctgtcacagagaaacagaggcctcagtggaaagactcagaccccgtgctggctgggattggagaggaggtgagtttgttgcatgagcattattcttataatagctcggtcagcgagactggagtggtcttaagagcagctacctggactgccattcctctaacattaggtcctggcctggaccctgtttaggtttgccctgaaaatgtagaagcagtggcctttctgctgccgttcagaacaaactttctccatgtttatggtctcacagattgcacacttccagaaagaactagaggagttaaaggcccggaccgccaaagcctgtctccaggttggcacctcagaagagatgaagatgctgcggacagagtcagatgacttgcacacctttctttttgagattagagagaccacagaggtttgtatcagtggaaacctttcctgagtaaaaggaggcttttagaaactgctgttagccggaacattgatattttccgaggcccctcagctcggctgcggtttctcccgcaaaagcctgaattcagactatcggaactgaggcttaccagagctgtctagctgtctgtttccattcccctctgtaagagggagctccatctctacctctttagcacataataggcactccataaacattggtggtaggttttttaaattaacctaagtatacttccaagagtttcctttatggtattagggtaagataatgatattttggagcatgcacatacaaaatgtcaagtgtttattgctgagagtgttatttactgttattctctggttactgagtactcttatcaagccagactctgtgttttaccaaggtcacctcatgagttctcacagattttctgcctgggggaagttgtgaccctctccattttgtaccttaggaaggcaagtgagctgggcgtagtagtggcgcacgcctttgatcctagcacttgggaggcagaggcaggtggatttctgagttcaaggccagcctggtctgaggagtgagttccaggacagccagggctatacagagaaacccttttctcgaaaaaaccaaaaagaaaaagaaaggcaagtgagtttttgaaaggatttggcagacatattatcatgtgtctccagtcttctggtctaaacaacaggcttagaacgagaaagtccctcatggagctggattgtgagttctgtctctgctcttattttctacattgtcaatcttcagaagttgaggttttaaaaacaggagaaagggtaattaaaaccaggaaaactggccgggcgtagtggcgcacacctttaatcccagcactcgggaagcagaggcaggcagatttctgagttcaaggccagcctggtctacagagtgagttccaggacagccagggctacacagagaaaccctgtctcgaaaaacaaaaaaacaaacaaacaacaacaacaacaaaaaaacgatagaacatgtttatacaacccccaacacaaaacaaaacaaagtaaaacaaaagctgaaactataggaaagcagttttgagcatggggacaaagaaagttttaaactgagatcttcaccatttaaatagtgggcatttatcctcctgggtctacatagagggtttcttgttttgtgtttgtgtttgtggctatacagcagttccattgttacctctctgggccttttccagtctcttcatggagacataagtactctgaaaacaactttgctggagggctttgctggggtcgaagaagccagagaacagcacggaagaaatcacgactctgggtatctccacctgctttataaaagaccgctggatcccaagagcgaggcccagctccaggtaggcgagcgaagcctctctgtcaagacgggttcagaagcagtgagcttgagtccgtggatgtggttttgagtgggtatgagtgctgtctcctcaggaagctgctgattttctgctaaacactggctgtgcttttccataaatttacttgcagcaaagaaactggtacacttttttaaaatataatttaaaatttttactttaaagatttaagtcttgagtttgataaagtcctttgttaaaataggtattcataaatcaaatcatgaaataataatgaaaaaatcataacatcactgtggcacctttcccggcggtctataggtatttttagacattatttccctctgtggaagtagctggannnnnnnnnnnnnnnnnnnnaagccggaggttgaggaaaaacctcccacaaaggttttttttaacagggttgtttccaaatttctgaaccagaaagggcctttttaaaaaaatttaatttttctttaaaattagtctaggtgaaaagcccttgtaaaaaggtttcataaccaatcctgaaatatattgaaaattcatccctcctgtggcactttccggcggtctatagttttttagacattttcccctctgggaagtagctggaaacactgtgttagcacacgcctcacactcaggagatagagaaggagactgctgagttgaggccaacctgggctttcctaaatgaagaccctctcaaatataagaacagcatgcagaccgcagctgctctccagtgagagctcttggttcctcagagagatggtgcatcctgagctaaggaggtctggcctgagctcatgctcgctggggatagtgccgtcagagcctcggactgggagctctgtcacctgctgtgctgtagcacttatatttctctttagctacttgagttttgtttgcctctgtgtgcacgggtcatcttttccttccactcatcatggagtccagaggggtgcgtaggcagccctgcttctcctcacttcagacatggtctgtgggtgtggtgagggcctctatacagaggacttagaccttaggcttctgttcctggttttctatcccatgcccaggagtcctcccagcacctggagggtgagagaatggctcttacagaggtctcagtgatctcttgggatcactgactgctctttctctgtgggtatttcttgccagggctgttctcagactgcagccccacacacaaacccctttgcctctgttccagttgcctggcctagaggaaagcattgagcttccacactgagaaaagagtaattgtcttcttgaccatgctaaataggtaattgcaggaaatataattggccacttaccacatacaaagcaggggtggtgctgcagtgcagactgcggctcataactaacagagcctgcgccatgcccttagcccctgtgctacaatcaggaaggtggacgtacaattttcatgtggggtatattgccatgggaccacagatgacaaggtggaagccactgcaaaatgttgcagcctgcctttgaagaaggtgctgctccacccagttggcacgtgttcggaagaaagggcatcagctagtgcaggcctgaggtcatggctgaggtgggtgaaagaaagccttctatggtcattgaatgcctttgaggccgctgcctccctggattcagcttggctctttctaaatgacattttctgttttatggttgagacagaacacttttctcagaatgtgtgtgaaatacatttccccacagtcagataagtgccatgtgtgaagagcctcctgggctgttctcagtgcctgtatacttcgttgattaaataattagctccatttttaatttttgagtgaaaaatcgtatagccatgaaggttagctgtgcccccagctgaaagagtgttattacaggcttagcagcctgttggagttttaggtgtggtgagttgacttccagtatggatagcattgtgtatttttgaatagtgcttctcaaatggtgagatggcctgtatgttctgtgctatgaatatctagggtcagaggtattcccagcaccaattgttgaatcagcttgtctacttgacagttcatttcataatgggggaggagaactaaatgggcgcactgtgagtgagcatagtgggctgctcctgcaagtcccacccttcccaggggcagcaggggagaggaagtgggtgcgtctgttcctctcatcctctcccccagtctctgctccatctctgttacactactgcagaaatggaatttccgtttttcattttattaaatggcttttatttaatggatatattaaagcctagtgttttccttgttcatacagttctcaatatagaaatatttcaagattatttttgaatactttaatgcatcttccccccagctacccagctagctaccagaacaatgaatcatttgccttttaatttttctcttgtaggaaattcgccgccttcaccagtacgtgaaatttgctgtccaggatgtgaatgacgtcctagacttagagtgggatcggcatctggagcagaagaagagacagaggtgagggcgaggacatgttatcccctccgctttttgtaggagcacaagtaaaaatctcacaggcacctttcctcctgcttagccatttcacctttacatgtatcatttacaaaaccctgagtgatggccgttgtaatttatataaatgagtttgcatcacatcttatgcatggaattttaaaatgataacttgaattttaactgggcgtggtggtgcacgcctttaatgcgagcacttgggaagcagaggcaggtgaatgaatctttgagttcaaggccagcctgggctatacagagaaaccgtgtctcgaaaacaaacaaaaaaaagaatatgcattttgtaagggttgagagtagctcggggataaggcagttgacttctgtgtgtctataccacatgttcaatgtctagcatttcaattgtcaaagcccaaacatcaagaaggtatacgttaccctttgttgccaccgataacatgttcttgaggaattacattgaatgatttttatcttgtatcaaacgtataaaataattgaaaagcatttcagatgttttcagtgggaaggtacaagtgttggagagaggaagcagatctgtggggagattcacagaagcacctcacagctccaccctgctgccaggtgggacttgtgtagtggtaacatggctagtgtgacagtcccactgtctccaagacacactgccaactgtgcaggcttcagttatcctgtaagcctgctgcattgctgagctgcgcgcccatatcaaacatgcctaggccagcgagttcccagttagtcataacctggctgcagtgtctaagtccattatgtgaaagaactcagtggggaaacccccactcagctcccgattcggcgtgcacccaagaatcacgaatagaacacaacaccttgatgtaacaacaagaggtttttaatggcggagctccgggtcgaaacgtatctcacataacaggagacagtggattcgaccacgaggcttggaagctaggggtttttatagaaaaggagtggggctgggggaggaattggcgcggtttcacatgattggtccatttaaacatcagcagcctgtaacatttaacttaggtcagaggggtaggagatagggaggcgatgggcctgcccgggcatgtcctggtctgttctgctatgttctcagccccaggtttcaaagctcacaaacaactctttgggctatttgacatacattacatgaattacagttttatttcctttcatatgcatatcttgtacataactgtgctacaggataatttatgtgttatgtgtctgtggtgtacattgcaatattttgtgaaatgtaagattatttcaatattattatgtgaaatgaaatatggatgatggaaccaaccacccaagtgtcatgccaaggaaaacatcaaataaacctagaacaatggaaaaaaaagagaattccccatgggattggataggatggctcaatggttaacagtcctggctgatcttccagaggacctgagttcaattcccatcacccacattgggtactgcacagctgcctgtaactccagcttcaaggaatctgaccatcttctttgcacaagctctgtatgttcatagtgctcatactctgacacacactaagtaaacacaccttagaaaacagagagcagtcctcttgtacatttgttagttttccaagttgtccttttgagaaaatatttttcttcccacccccacttttttttttttttggtttgtttgtttgattagcattttgagaaatgctctcaccgtttattgtcccgaaggccttgggtgcttggcattcctcctgcctcagtctcccaagggctgggaatgtaagcatgagcatgagggaaaattaattaaggtggctgtttaaagtgatgctgaagacgggcgagcttgcagctgcctgtcatggtctggtttgtgcttgtgctttgtagaaggaatagaatgctgtgtgctgagaacgaggaagtactccagaaaagcatgagtgtgttaaccctcatacacgttgctttgcctagaagtaggctttctgagactgcacatgctaccagaaacgagctttctttactgttactgccccagccatctcctcgctgcacggcactgatcaggtccctttccgcagagctcaagttcactctcttggctgccttgttcttctcagtgggtccgagaaaaggaaataaaactgaaagtttctgttgaacatcagcagttttcattctgatcgttctgtgctgagagaccgatgcccagacagacagcagcagacaaaccatgtggcttgtacttgttttgaactacccattttttgtttgtttggttttttttttaattttttattagataatttcttcatttacatttcaaatgctatccttccccccccccaaaaaaaaaccctataccctccccctgccctgctcccctacccacccactcccacttcttggccctggcgttcccctgtactggggcatagaaagtttgcaagaccaaggggcctctcttcccaatgatgtccgactaggctacatatgcagctagagacacaagctctgggggtactggttagttcatattgttgttccacctatagggttgcagaccccttcagctccttgggtactttgtctggctcctccattgggggccctgtgatccatcctatagatgactgtgagcatccacttctgtatttgccttgtgctggcatagcctcacaggaaacagctatatcagggtcctttcaagcaaaatattgctggcgtatgcaatagtgtctgcgtttggtggctgattatgggatgaacccctgggcccatttttgttttatttgtatatttttctcaagctaaaagacatttttgtcaatgctcaaaggtttataatgacaaacaaaagaatctctgactttagacctgccactcagcagcaaccattggactgtttcattcttaaggaaaacagcaccttgctcagtcagcagtcagtgactgggatgggacccacacacttccagcctgccttattgagtgtaacttgcatacagaaaagctcaagtcacaagtgagcacaggagggtttgcctgttgttggctcctgtcttcctcctactgcgtccttcccaatgctccaatattgtgcagtctgtactatggctggctataggccttctcagtctagctcgttctcaggtgattctcacgctctcttacttcctagtatctcttgatgtttcagcttctctgttttattaatttccctgttagaattgcagcttcctatgaggtggggtagaagggagccacttgtgtctaattctttcccttgttgccactaggcgcctaattgtgccagaacgagagacacttttcaacacgctagccaacaaccgggagatcatcaaccagcagaggaagaggctgaatcagctggtggacagtctgcagcagctccgtctctataaccacacggccccgtggagcctgccctcagcgctctcaactcagagcaacagtcacaggtgtgcaggagatggctgctgggcagggagcagtgagcctgtgaggtggccttagagtgactcgggcagtcctgcgcctctgcctctcagcatgttgtcctggtcaggttcctcaccccctctcacctccagttctttgactcgagcaggggtgacagtggctgccttccaggtgtgtgtaggcctgtgtctgtaaggcatggagtgtggtgtctgatgatgaagtgggtgctcaggccgtagcagtctgcagagtagcgctgaggcggctggaccgacaggagcgtacatgacttacattttctaacttccctcagaagcccagatttgccattcagctttagagcggagatgtgcagatctttgcagttagccagtttacccagaacttaaccctgatggtgtcatggttctgctttcagcaagtgtgggctttagtggtcctttttgctaaggcaccagtattaggcttagagcaggagtgtgtggcgttgaagttgttggctttcctttcatgtgctgataggtagcttgtttctatagtgaatggtctctgctctcttgggcttagatattgagaagagtgtataccacatagcttcagccttctcgtggttggtttggatataacactgccctatttcagttttgacagtgaccttgaatgcctgctaaaaactaccattgaatctcacaccaagccttctcccagagtgccaggtgagtgctgccccctagcctcccagcatagtttgtgatctaacctggctcatcaaaactaaagcttaagcatttgtgggttggtgaattgttttgtaggtaaattgtccccggcgaaacaggcccaactgaggaacttcttggccaaaaggaagaccccaccagtgaggtctactgctccaggtagggaactagacctggggtttccagcactggctgtgcagtgctagcgcacactggaggtggataagttgcacagatccccagagtctgctgcagtctgagcatgggaagaagcaggtcgtgtattttggatgacacagctcaaggtgaatctttgcactttgacatcatgcagtccccaggtcacatggtgatggttaagagtggcatgggatggactgagctggagttaagactcaagccttatatgagtttttaccaacattacattggagaaaagtcttcttacaaaggaaactagaggttaggcagctaatacttgctaagggactaggaggtaaatggcccagtgaataaaggcgtatgttgtcaagtctgaagatctgagttcagtccctaggacacacacagtgaaaggagagagatgactcatcttttgacctctacttgtacgttgtggtatatgcacacgcatacacatcacagtaaataaatgtactaatatatctttaaaaacttgctgaaaaaactacaatattagagatgaaaggtcttttaaatttttatctaaaattccttaatttttttttttttaactcagtgctggggatgaaacccagaacctagcacatgccaaggggtgtctacctataccactaagctacatcttatcccttgcatatagctcaggatagcctggagttcacgatggaactgtgtgtagccgtgtgtttaattttccaaagccaggctacattttgccattgccctggtgatctttaacactgcatctgacctccagcacagcacagttgtaaagggttttgtttgctaatctctgccttttagtcctttcctcttggagctgcttcctaagtcttctgcctccagaggattttgccagatacttttccatggccacctcttctcaggccaccacttttttggggaagggaaacataagcacacaagtatagtcatggctatgctgagccatggctgccttatgacagtcagacatgtcagtgttctccttgagacacggcctctgagctggagctcgcagtaccattgatccccgtgtctctgcctccttctcaagacaggcacagggccgcacacgagcgcctgcttttcacatggctgcctgggcgttttagttcaggcctcatgtttgcacagcatggactgctggccactgagccatctccctggctccatttctgttgcagcttctcaaattccaaggctttgccaaactgttgtactgtcagaccttccaggtctgtgatactatgttaggttttttttgttgctggatgacagcatgatgatggaaatcaacttggaagagaaagagtttatttcatcttatagcttgtggtctggtgtcatctggggaattcaggtcagaaatcaagataggcctctggaggcaggaccagatgcagaaaccatggaggattgctgctcctcatgtcttgcttaggctggctgctatatagcacccaggatcgacagctggtgggtggctgtgcccacagtcagctgggccctctcacatcactcattgatcaagaagatattcccacaggcttgcctataagacaagcctatggaggcattttctcagttgtggttctcccaatataattctagcttacgtcaagttgacagaaaacaacaacaaaaacccacccaaccaggacaggcagcagtacctgttatctgccactaacactaccataatcagacttctcttctacagtaaacctttcctgttgtttatgttcattgaacatgtgcctgatgatgactttgggacagacacatccttgtattagaaaaccattgcagttatccagtcttgttaatcttcatttattgctgggggttacttaaaacatccttacttatacatccttagctcacatatctgattgtatctttatgattgagttcttagatgtgagatgtgattgactatcttgccgctaggtagtgataagagtagcaaggtctgaccactcaaaatttgaataaagagaacgtaaacattaaattgaagctacacattatacttgtttaatgatagcacacatgctagggagaataactcaggacatgggcacttttttttgttttggagatagggtctcatgtagtccaggctggctttaaagtctgtgtaatggaagatggcagtaaacttaggattctctttctgcaccacctaaatgctaggattccaggcattaccaccgctcacagtgtatatataacagttattttaattttttaaattgtaacatggttacaaaaaagtatacaaatcaaaaaacaagtaacctctactgaagttaaaaaacaaagcacctctctttagaaaaccctctcctggagctagagagagaactcagttagaatgacagctcggtgaacatgcggtcctgagttcacatccccagcagccacataaaatgtttttgcctttgcctttaatctcagagacaggctgatgcctagatacctctgactctccagccttagccaaaatagcaaattctgattgagtaaaaggctatctctaaataataaggtagaaagtgatagaggaagtatcctgttccagccttgacatgtgtatgcatggatgcacacacacacacacacacatacacaagaaatctctcttgtatccctcacattccctcttaaaataatatgttacatgggaagatgttgaagttatatctttgctggcatttttaaaaatttatttacatctgtgtaattttttatttattttgaggaaagaaacctgtaagaatatagtcactgagcctgtgagttggccatgccttagcttgagcttaacttaggatctttttgctttaccatcaggaagattgtactcttgtagcctttctgtcttcaaattcaaggcagtgtaaagttcaaaatctaacacaagatactcaatactctgttataaaaaaggctttgtgctgggtggttttgcccagctataggttacttgtgagctgctaagcatatttaaggtagaccaggctgagctgtggtgtttagcagcctctacatattttgtgcccttctgactggtttcttcctcttccagtgggcttttgcaacatgactctgctatagctaaaggagcatctgtctagttttccacagctacatcacttctccctcccactcaggacagttgttaggatggctttggtactagggtcacactgaggctgcacttaagacccagcccataccaaccctcttcccttgttttccctaagctatttttttagtgagaggacagggtaatagggctacaacaaaccaccacggcttagtggctcatagtagataagcactgagttcagcactgtgtggctcagctaggtcctgtgccgagtgaggctagactcaaggtgttgcctgagctgctcggtgggagctgtggtgaagatttactgaaggaggtactgaaggaggtcccatggagttggagggtgaggttctcgtcccctctggtggcattccttgtccctcatctttaggccacaattgcagagaactcctcttctagagatcttgtctccatggacttctgccttctcttcagcctccccctttgctttaatcctgtgcctttaagagagggattgcttgggtggtggtggagcacgcctttaatcccagcactcaggaggcagaggcaggtggatttctgagttccaggacagccagggctacacagagaaaccctgtctcataaagaaaaagaaaagaaaaaaagagttcatgggatttgtcctgtaggataagctctctgtttttaagttagcagatttgtgggctgacgagatggctcagcgggtaagagcactgacagcttttccagaggtcctgagttcaaatcccagcaaccacatggtggctcacaaccatctgtaatgagatctgattccctcttctggtgtgtctgaagacagctacagtgtacttatgtataataataaataaatctttaaaaaacagttagcagatttgtgacattacttatacctctagggtgccttttgtcacctcctcttgctgtgtgtatgtaaccctacgtctgtccatccatccctacagtggaaatcctgttggcataggaccctcttatagaagcattgagaaaaaggtctacaaagttagatgcacagggtttgaattctggctgcttaccaactttataaccttaggcaaattgcttcactgctctaagcagtggccaaaagttcagtaacagtacctaagttctgtggtgattatgtgaggagctggcacagtatgtctggacctgcctccttcctggtgctgcttttggttgtcttgacaaggtagcactgttaactaacaaaggtcataaaaataacagttctgccatattgcatgtgtaaattaactcagctggcttccccaacctcctactgaacaacttttggctcagaaatggaagacacagaaactacattcttacattgaataatgaagatatcaagttgtttgcagaaaataaactttaatattttggatcctggtatcatatacttagatggcatttctaagtggcccaccacatagttgtctgtctcagaatacttgatcagagcatgttcccgcatgcaaaggcactggaaatgggaaaaagaactttgtcttttttgcacttatttttatttagtttttgagactaggtctccatttgtggttctgactgacctagaactatgtaaaccagagtggcttcgaactcacagacatctacctgcctctacctcccaagtcctgggattcaaggcttgtatcacagcacacaccactgtacttaactactttaaataaccacagtggctagtagctactgggcagcagtgccctggtatatgatttttagctttacctgttgtatagcacttatgctgagattttgttttttgagacaagtttcctctgtgtagccctggctgtcctagaactcactctgtagaccaggttgacctcaaactcagatccacctgcctctgtctcccaagtgctgggaccaaagcctgaaacttaagatattgtagcatgatctgcctacaggacagacaagcgatagtataagagtgctgctttgaataactagggaaggaacggggctgggcattttgtttctccagtgtacaataatagcatacattctcaagcacatggtagaaggtggcagaacctgactccacagtgtaaagagcagagaagaccaggctaagtccatgtggagggtcacaggactcacttagatgtgagtgagatgctcagactcaggccgtctcactctggtgttctgaggttggaaagcaggggtgatgctgtggctgactagcctgccctgggagctggcctctgacatgtctgttttctgtgagagcttaatctcttgtttttctaccagtgctgactatcgctctcattttcagtcttgtctgatggtcaaagctgtctttgtcctagcagcttagttttcaaagcttagttttgagcaaagaccacaaattctcattattcacattcagcaatagcagcttccacctaaggtataaaataatgaaagtgctttatggtctgtctcttagcactgaaatggcacagcttttgggtttgctttgagttgtctaatgttgttttggggtgggccttctgcagccagcctgtcccggtcagccttcctatctcagaggtactatgaagacttagatgaaggcagctccgcgtcatccgtagctcagcctctggagggagaagatgcccggccaacctgcacatctgtagctcagcctctggagggagaagatgcccagccaatctgcaaagaggaagaggctgtggtcccagtacctcggcatgcccctgtggtccgcacaccttctatccaacccagtctcctgcctcagtcgatgccctttgcaaagcctcacctgatccatagttcttcacctgccgtgatgagctctgcaggtaagtcaccaattgaagctctgcccatggaggaccgtagctggagagctgcatgcccatgtcacagtagccactcactcactgaggctgtctgcattgtgtgctcactgctacagggcagttgtcagggctgtgtgtcacagcgacctctagcagagacacaggactgaggtacaggagtgaagccactttacagaacagcattcatccctgttaggtttctactgagggggctcaccagggtttagactttagatcactgagttcccattcatttctggtaatataccaaaaattagaagaccaattcaaaagatacaggttctcttgaagaggttggaaaggctactatacaagactctgttactatacacagtaacagcttcactccaccatccactttgctttgttaacgtaggtctctttcagaagtaaaggagtgggctgtttgcctcagtgtaaagcagcacgtggattcagggcctcctgtcagtagctgtggggcatcgggctcagaacttaccagctccagtgcccatgtcatagtcactcgctgaggccatgtgcattgtgtgctcaatgctgcaggacagtgtcaggaccttgtgccatagtgacttctagcagagacacgactgaggtactggaacaaatccaccttacaggaaatcaggctctctgttgctataaatgttctctgtaacgctaaaaaattttaatttttttaaaattttaatttaaaaatttttaattttagtgttttttttttgtacaatgcaacagaatttaccattttaacttttcctctgtttccttcattgaccccatttgtctgataatttttcttttccccttagtctctacgtcagccaccaaagttattcctcagggagcagacagcacaatgctggcaactaaaacagtaaagcacggtgcaccaggtccttcccacactgttgcagctccccaggccgcagctgctgcagccctaagacggcagatggccagtcaggcaccaggtaaagactacagccccatttctaggagagattgtgagctgtccaggtcacaggcgtgggctttggggtgggagacagctggctttcttgccaattcttagccgagaaggctagtttgatgaccttcatccctgtgaggagagcttccaggaggcaaagactaggtctcaatttttttgctttgaaagggaggtattagatgtgccacatttagttttatgggaaattgatgaattttgatgctgattttcctacttttgattggtgatctccagaccatctgacatcataagaacaatgttttacggatcccaggcactgggagggcggctgcactactgttcctgttttttgttgcagtactgagagaatcagcagagagagttacccaagcagtgtataccagagcttgccctttccagatggctgttctgcactgacgttggctttagttaggacagtgacttagctgatcaggacttaggtctagggagtgggactcgggctagttgtcactggttgtggccttagcaagcggttcccactcagaggctgctcatcctttcagctggcccaaaaatagttgtagagttaccggctaggaacatcaaagaagaatcttaaaacaaaacaccccacaaggacaggttatctgttccccaactgccaaatattttcacttgggatgttctgagacatggtggactcatacagctaggaaagaatggttagccagacagagttgcttggaccagtgatcctaatacttgggagctgactgaagcagattgttgtaagttcacagccaaacggggatatattgtgaacttgggagtctacctaggttacagagtgaaaccccatctaaaaaacaagcaaacaaacaaaacctaaagaccattaaatagcaataaatcaagtttaaatagaaccttctcatggtacctaaaacacataataaaaactaaagacaagataacaaatctcaacttatattcaagctttcagaacacagttatttgatggtctccttgtttcctggacacacaggatcttgacagtacactgatcaggtccctcatccagccaactttataaagttcagatttgtcaggatttaggatgctgtactcagcacgaactggaaccgtcacactgtctcttggagcaagtttttagggtggagacactgtcacgtgttcagatgaattgtgggcagttcatggcgtgttctcccagctcttccgctggagaaggaagtgagcattcccacagatccacaggctgcctgggatttgctcaggggagaccagagagctttactccgccttcccagttgttaacagaatgtcattaaaggtgataaagtatgacggagaagtgaggcaaaaaggattacaaagctggtgtgggggcacctgtgctagcactaggaggcaaggtcagctgcatctctggaatgtgagtccagcctgcggtactgtaggctcgtctgtgtttgcacatttacccagaacttggcacatcataagcccatgggagaggaggaatgagaatggcattggccctgagctgagagctcttaatcctctgggtgttgccacccctttcaagatgagccaacggtgtggcaggtatctgggttctgctgcagaaagctggctagggaattgtccctctaagccagcaagctttattagatggcaagaagtccactccttggcctctggtaatagtcagccaggtgttctattgactgcactgctgactagatctccttcatttgaggttgctgtctgccggaggttatgtgctgggcattgatttctgtaaactttatagaaaaggattttaaatcctctgcaggaattaatgtagttctctcttccctgtttacatagctatgagcactctgaccgaatcaactctgaagactgtccctcaggtggtgaatgtacaggaactgaggagtaatccctcgcccccatctgcggccatggggtatgttacagctcttctctgtacgcagcctgcagttggctgtcatggacgcagttggtctgaagggagcactgctgccacagcttctgtagaggcctgggctatggagggatgggcagccattactaagtttttaggaaggtggactttcacctttccagggcacccactataaactataagccagatgtgaatttggatagacccagtttattaatgttcttcaggtcctgctgaccactgtaaagatggtgggccatggagaatgacagtgccctccctgacttcctctctcctagcatttccactctttacttttttctcatgaagaaacagtatttgagaagcaagcagctacacttgcagaacttctgcttctcttctgtgcttatttaggcaagattcttgccagagctcacttgcgtttggtctccaccggggctggtattgtgtggtgccccccttatcccacccagggctcatgttgtgtggtgctccctctccatacacactcgtacatttcctttagcagcattgttcaagtcctactcactgtgcacaaagtttgaagcctcatagtctgtggagcagctagcctccctatgctatctgaaagagttgggagacattcttttgccttgaatgggagatcatcagagactagtatttttagggaacccaatgtctggcgcccatggatagtcagtggcaaggtgagcaactacagaccctgtgttttcacactgtattcttgtcctctagtgacactacagagcagacctacctacccaaggcttgttttcttgagtggccttgccatgctgatgttggactttgcctgtctgtatgttggtctatttaccaacactgcctattgtcaacatttctagttatctcagggtcaaaccaaattcgccctctttactgtccagtaataacttgaagccttccttggaatgccatttggaccaagactggtatttgtggttgctgtgaacccttcagagaactgtgcactggagtttgggaactatagcagattcccactggagagaaggcgggaggccactgaaagtcagagtgttttgcaaggccagtcttgtgggtgcggtgtgggcaggtacttctcagacactgactacagaagagaagcacttttgcctgctcagctcacctccctcattctgctcatgcctgatggcagggcttccctagctttgctctgcaacacaacacaaatagccaccaacggtggaggaagtgtttttaaaccttttctttatcatcttctgtatgtatggtgtgcttgcatgagtttatgtgcactatgcgcatgtaggagcctgtggagtccagaagagagtattagaacccctggaactggagttagcactatctttgtgagccgccctacatgggtgctggcaactgaacctagatggcctacaggagctcctaacactgggccatcagaatctggtaacatgttctcttcctttctccacagagttgaactctctgatacactactgagcttcagcacccaatacctgaagcagtttccttttgttttcattttctagctttaaaattgtttcctttttaaagatttatttattttatgtatatgatgctctctatctgcatgaacacctgcagactagaagaggacatcagatcccattacagatggttgtgagccaccatgtagtttctgggaattgaactcaagacctctggaagagcagacagtgcccttaactgttgaaccatcttccagccccttaaaattgtttttaattacatttattcctgttcatgtgcacacgtgtgccaaggcacatatggagatcagaagacaacttaaaggcattggttctccttccagcctgtgggttccagcaatcagggtggcttgacacctcactagccctttttttaagtagacatttatatagctgataatcttgaaaacagttcataagtgaaaattgatacatttcaccaacttccccatgggtgagttcattgtcaaatggctgactttcagggccttgtaagcagctatctctaaagtctattaattaattttgcacttaactattcttaggtgacaccacacacattcattctgctccctgtgtgttgtggttgtgagactggcttttctctttaactggaacaaatccatagctgttcatactcctgtatcgctccctgcagagcatctgctgtgagtgtggtgcttccctggggtgaaggagaagtagttgtgaagaaggccttcatccctgttgtcgccacagggacctcagccaggaggccaccaggcaaccaaattcattggttctgccttgtcatatatgcatatttattaaaacatatttgctaataattaagattgtccaaaagaagacctaactgtgtctcttgatttaggccatggaagcaagctgttgatctaagtgaaagaatgagtcccttttcttaagcagcagcaggcaggatacttaccattggtggcctaagaagtgctggaacgcctcgcagcagctctgcttccattgtgcagtctgattgtgtctactgtggtcctgattgttgcttcccttcttagaggtgtgtgtgtgtgtgtgtgtgtgtgtgtgtgtgtgtgtgtgtgttgcatacctgtgtatgtgtgtatcacatgcctgatgccagtataggctataagagggcatgagttccctagagttagagttagaggtgatggtgagctgacatgatgagctgggatttggatgtggttcctttgcaaacactcttgccactgagccgatctccagcccggttgtttagtggttttgtttgtttttgataagagtgtacaagcagtgtcacacccatttcacagtcctcttgatactcaaaatatagcagagctgagcctggctttccctaatattctcatgagcatttgtgtgttggcctccttcatttgcctgtgttcctacgcagtcctttgcatactctctcatgcgtggactatttgctgtttggcccctttagtcgaggtagagctttcttgtagctggtttattggtaggttcattgggtgcttgtgccaaacagcgtttctctacagagaggtcacgtggtatagtgtgctggtttggtgcctcctggttttgtgtttggggattcaggatgcccaggagacatgtggcattctcacaagtaaatagaacagtgactgtacacaactttgccttcgtgatttgattaccatcatgttgtcactaaggtttagctacaaatattttccatggtttggataaaatactgttttttaatgttcatttctagtttttatacaagagattcatttcccttgtggttccctgagctcagactgttctgtcagcaagttgtctaaatccactctggaatcttgggacccagcagtcttgccaacacattctgggtctctggtggaagagggcaggaacagcctgagaccccgaactgtggagcgtctcagggcattcctgtatcttcatctagggcactcctgcatcttcctttgctttggcacaatcatcgtggggggtttgtttcattgagattgagtctcttttcttcttcagcctaatcaagtctaggaagattatatgatatcacacagaatttagatagaccattgaggactaaaccatttgctgatttcgtctttcaaaagaaaaaaaaaatttatttatttatttatttttagatcaggtttctgtatagccctggctgtcttggaactcagatagaacaggctatccatgaactcagagatctgctgaactctgcctcccgagtaccaggattaaaggcatacaccaccactgcctggcatcaaattaatttttgatggaaagttattaataatcttccctcaaatctgaaaagagttctaagctcctacatcccacaactacaactgccactattcatttcagttaaagtaactgcactggggacagagaaattgaaaagcttttcctaaataataagagcttgtgtctatgatagaactgacaggtgggtcttcatatgctaccacaaggcaggtagtgagacagtggttccctaagtgcagcagacgggtttagtgagagcttccttggaaactggggtgtgccttcgttcccagagtagccaagctgcaggctggaaacagcaggtgtgttgtggaatccacccacagctgtgccagtctggggcaggggcagcacttttgctatatgtgcagctcatcatttatgcctcacagttcctgttgaacatctttttttcaggtttgaaaaagaataggaggggttggtgagatggctcagtgggtaagagcacccgactgctcttccgaaggtctggagttcaaatcccagcaaccacatggtggctcacaaccatccgtaacgagatctgactccctcttctggagtgtctgaagacagctacagtgtacttacatataataaataaataaatctaaaaaaaaaaaagaaaaagaaaaagtttagatggaacttccgaaccatctaaaaccagggagaaaggaagggggaatgccagttgtcccagtaagaacagcatctatttggaaatggttataaattgtttcagggaattatagataggtagaagaaagttaacaaggtcattggcttgcattttatataattgaaaacccagatttcatttaaaactaattcttcagcaaaatgtctgttgagtgtggggtccaagacatctgtatgccgccccaaagtcttcttatgtgttgagcagggaactagcttgaggttgaacatatttgccctccgtaatgtctcagcaaactctctctctttcagttctgccgtgcagcactcagcagccaaaacaccccatgctgtgttaacccccgtggctaacagccaagccaagcaggtaacttgctgatgtattctttagcaatatgtctctaactgaagatcattttatgattttccttcatttaaatgaatgtgattcttagaaagggctgacacttcttttccataactcatgccagtcctgacatggttaacctgttgaggccattgactttctagactcgtcatcttagggcatgtgctaacagaatgcttttggatgagatgtttagtttgccatttgttttgtttttcttttctttttttctttttcttttttcttccccccccccccccagacacggtttctctgtatagccctggctgtcctggagctcactctgtagaccaggctggcctcgaactcagaaatccgcctgcctctgcctcccgagtgctgggattaaaggcatgcgccaccaccgcctggcttttgttttgtttttcttaacattgtctcagtactgacttgtgcagtaggtatttagatatgtctcttttgaggcagccgaggtcaggtgagttacatgggctcatccagtcagttattgatagaagcagctgggagccaaggctgaacgatctgccctttgcttctcccaccgcactgttggaaatgggtttcgggtatggattgtcttactttactgctgcagctctgcctttcagaggttgcatgcttttggtgatgtgtctagctctgacttttgattgattgtaagcagttaaacagtgaaaaagaaaataataaagagggggctggtgagatggctcagtgggtaagagcacccgactgctcttccgaaggtccagagttcgaatcccagcaaccacatggtggctcacaaccatccgtaacaagatctgactccctcttctggtgtgtctgaagacagctacagtgtacttacatataataataaaataaataaaaaaaaaattaaaaaaaaaaaaaaaaaagaaaataataaagaaagcagtggggtgtgtgtgaattaggaggaggctagaagggaacccaagctatctctggagctttcccagcagtcctgtttctcttagatctgtcttggagatgagcagccttagattgcacttgaatccagagtttgagactgcaccattagctgccggctgtgggttcccacaccatcctgtgcctctgttccccatggaggatggtagtaggtcatacagcggcaggggtgctggctgcaggtggaaagcccggttgcttctcctgctcactaattgctgggactgtgttcttcatccacccatcccgtcctctaacaagtactcaagtgccatttatgtggcagacactgtactaggtaccgagaagtcagccatgagtcatgcagaagcctccagtgtggtgttatattttgttatttttctattcctccttttcatgggtaattaaactgaattcaagtattcgagtttgctgggtttatgtttttacatttccgtttcagacgttcacttatcccaaggataattagcagtttaccataaatgtttttcttgtgttctgtacaggggtctctgataaattctttcaagccgtcaggacccacagcagcatcctgtcagctgtcctctggggataaagctgtaggtgagtctgcatgtctctctcatgagaatgaagacaaaaagtgctcttgagagttccttctgtagatcctgaagccaataggcagatgccgaattccaaaggcctcagttttgaggaattgtaaggacatcgataagtcctttaacacttgctaaacttggagtttagactttagagtcagcatgagaaaacgtttgatggtcttttatagcagtgtctttgtgcatcactgcatgatgggtgaagagaagttagacagacagttgagcactgttccttcatctcaaagggaaagaactatcatacctcttgacgcccttgcaggtaaattactttcttttcttttctctcccttcatctcccttctcttttcttccctttccttccccctctctcttcctttctatatgagaccctgaggggcatgtctgtatagctcagtaatgacatatcaaatttgatatgtagctatagatgataaccttacctctgctttcctagtgtgaggattctgtgcatggtactgcatgcctgattttatgcagtgcaggactttctgtgtgctgggagaatactccttcaggtgagctacattcccagccccttcataataactattcaaaatcagtaaacagatgaagtacagcatacttgctgcagggtaagatcctattaggtaggctaatcatacaaggttttatagcttcgcagacttgccagcaaactgaagcataaatatttttaattaagttagtttttacagtagctggaagtgttttgaccataggataaattgctaaggttgtgcttctccagggaatgacttgacaggactgtcgaggaaatgagaaaaactggggtcagatgggccagccacagcatcctgggaactcagcgtgtttattatacacacttgcaggaacagagagggagagacaggcttgctaagcctggtgggagcggtctctgtagggagcagtctccaggctgtgagtaggggtgtggggaaagcgacagtgggtgtcttctgcacaaactatcagcattcacacttagacctttccctttgacatgtccaggacctgtcaagcattccacgctcgctaaggactctgttgcttcccagtacctagccactggaagcctatccatgagcatctctcagtgtttgccggtgatctcccgtagccgctggggggagggggcacccacggcttccactgaacagtctgtgctcacttagttctgcacaccacaactctgtgtctaacttttattttcatttccatctgacagcagattcagaggctgagcggcacccagcagctgcccacttcacataatggccaccagtcagtcagtcagtcaggcacctcctttctacatcatgcagaacctaattgaagctctaagtgttccttatgtgcaccccacactcaccactataggccaagacaaatttagtgggttcagcaaagacttgagtcatttaggttgttttttttttaaagtttcaaaaggcacgatcttacttctctgaaggcctttgtggcaggcctgtctcagcccctcactgttcactgctgccttcccttgcaggtgaccaaggcttaagagagcttttctctttgaggctggaaacatccctgaaaactgttcattgctgaaaccttttcttttcatttcagataaagtcccacatggtagctcaggctaacctgtaactcaatatatctggctcactataactcaggctagccttgcctttgagcttacagcaatcctcctgcttcaacttcccaagtgaagggttaaaggcatgagtcaccatacctatatttctctcatgagcgctctctctcccccctcctccttccttccccttccccttctctctctctctctccccacccccaccctcaccctctccctccctcctctcctctctcattgtatgtgtatttctggaacctgtagaataactctcttactcattagttataggaatacgtaattgtggccgggtgatggcagcatacacctttattcccagcaaggcaggcaggtctctgtgagttcaaatctggcctgttctgcatagtgagttcaagtccagcctggactacgtagtgagttccaggtcagccacagtaacacaaacccctgtctggggggaaaataaatcttgttttactgatcatgacatggttatatgcaaaaatatcagtgtaaaagtacaacatgttaaaagtgaaagctgccctgggaatcagttttaaaggtgcccttaagaatggtatgatccgggctggtgagatggctcagtgggtaagagcacccgactgctcttccgaaggtccgaagttcaaatcccagcaaccacatggtggctcacaaccatccgtaatgagatctgactccctcttctggagggtctgaagacagttacagtgtacttacatgtaataaataaataaataaatcttaaaaaaaaaaaaagaaaatgtaaaaaaaaaaaaaaaaaaagaatggtatgatcccagcattccagaagcagagggcaggagctttctgtgagtttgaggtcagcctggtctagagtgagtcccaggacagccagggctacacaaagaaaccctgtcttgaaaaaacacaaacaaacaaacaagaatttgatagacagatagacagacagatatcttgaggtcttttgtttgctgctcattagaattgttacattatgtagtaggagggttgtgcataccactgtgctcctgtcaggaagtcacctgacatccacaggaggggcatcctgcacaagttacctcctgtcatttcaccagatggggccctggaatccagctctggctctcagtcctgacagcagcttcctttccctgctgggccatctgtctcccctgcccactgcattgtatgaaacactaccaggcatttactgtgtgctggagactgcttccccacccttccagccccatcacacttgaacatctattcctcttcctggcagatcaccttactcgtttatgtaatagctgcctgggattgcgtctgagcagcactctgctgacagttgagagcttcttatacgttagttatggacaaacctgcactgagcatctttctacaacccacactgcatttcagtacggagtgaagcttaattaacatggggtggatagtcagtgtccgcttagtgtctgtgtctagagtgatcatgtgtagcaagtgtctgttacctctataggttaggaaggaaggaaggaaagaaagaaaaagagagagagaaaaagagaaagaaagaaaacgtattttctgaatttcaaaaaaaagaaagtaaaacctatggaaaaggcagaaatgtatagataactctgaggccactgcttagaaatgctcactgtatcagcttgcttatcttgggattttgtccctgtgtatatggaaagcatctgccagtcagttgatgtagaggattggtatgctcagctctggagttaggctgcacggagactgttttgctgacttttctggaaaggagagtgtgccatgccttgacagaaccaaagagcaagactgagagaccttgagcacaaggtgacacaccagcttccctcgacttaaggcttgtcacaagatacactggaggtcccaaaaactggggctgtggctctgggcaacagcacacagtctaagctgtagggaattacagaacagcactcctaagtgacttttggaatgtccttattttgtccatttcaggtcaagggacagccaagacagagtccgctgcgacctcgactccatctgctgcaggacagctcaacaagcctttctcattcgcctccccagggtcagtgctaagtcactatcagccagatccatgaaagtcctgagctctcacagctgtgccagtccatccacagtgttttaactgtttctgttttgtggttcagggttattatatctactgtttttaagcctaagcctctttttgtttggcagagaaagtttgttcccttctgtaggtcattgggtgtagcacaccaggtgttttcttttttcttttattttttggttttcccagacagggtttctctgtgtagccctggctgtcctggaactcattctgtagaccaggctggccttaaactcagaaatccgcctgcctctgcctcctaagtgctgatctctagttgtaaattcttcaagggcatattgtatgaatgaattataaggaggaatatttaaaagctgatgctgtgttaagtttgctccattttaacttctttttccactcctcaggacctttacttttgggacaatcacaccaaccccatcttctagtttcactgccacaccaggtacagtccctgtgttgcatagtgttctcttgtgttcccctcatgggagaagtgctgtacgtgactgtgtgctttctttgtaacttgtggctcttcttcagttggtacagtcaggttggtagtgatgatgtacatcagagacatgttggagggctgagagtggcttggtggtggggcaccttccagcacacaggacaccctggcttgagttcatagcagcagggcagtagcagagtgtgtaacccagagcttgatgtggggctgctgaaaaggctcagcacctggacgaggccaagcatctcagtgtcattcctgggacccacgtggtagaaggagagaactgaccactgaagtcatcctctgcctgcacattgtctgtaacatgcaaacaacacaaataaaatattttaatgcaataatttttttaaaagaacttgttgtgaaagagatctgtttacataactataaagaggaaaaagacttgcttctcaaagcttcatttgctgtaacattctaatgttaacacacaaacttggtcccaacaagaggtgggcatagtaccatgaagtaaatgatcaaacttggtcctcaacactggtacacatacctgtgctaggaacccagacccatccaaagacaacagctttgtcacattcctccaagctctctaagtaatgaaatcaaggaagcctttactgtgatgtgtttttaattaggaaattttgagatataaaccgtatgatggagtttgaatcactctatagcagccgttacagttctgttgcatttcctttgcagagttttgtctttagcaagttctcatgtaacctcatgtcttctgtcacctttgctgggtctgctgactcaggcttagaatctcggctatatagaggctgagagaggaagctctcaaatttaaagcctgtctaggctgaagagttggtccaggccagcctgggcaacttagcactggacttcctctaaataaaagtagaaaggggcctggaagacggagtgcaactctggaacacctgccaggcataggcaagatcctgcctgtccagggctcaagggtctctcccgtggctttgctgtgctttgtcgtctgtctgcttttcttgagtgtacttttgggctatacatatgataagtaagacatcagtcatctttagtttttcaatcaacaaaccttttctaatgtgtgctgggaatagaacttaatgctttgtatttaacaaatcttttttcaaaattttattatgagacatggtgtcaccgttactttgagaagcaagtcttaaggaaataaaagtcaggatgagatgcagcagtaatcctacatcaactctgaatcagtacaataatgggtaccaacccaaaggccataaacaacatcactaacaatataatgccatcttcagcaggaccctactaaacagattaattgcagtaaaaattatcatctgggttgacactctgaccttaaacggcgaagagctttcagtctgggtccaattgggctatgaggattacccatacattagctgataccaagagtaggagggaagcccttacccagggcactgtgttgagagcagtctctttggggacaatgtgtccattccatgtctccgagatgtcacacgtttgttgtgatgtggtgatcataaacagaatcttcattccttcccacttgagagctgactctgggagtgctaatgttcctgtgcagagcaagcggtcatcctgccctttcacaagaactctgccattagaaccatacgtttcgtccctgactgaagagaaagattgcctgagaagggcaatcagtacaaatgtgatgaattctattttgctaaatccaactcttttcctggtttctttttcttgctaggggcaggaccccctactaaagagccaacccagcttgaggcattctcatttggcgggggaggcaaacctttctctgaggccattcctgggaactcccctgccacaggagcaacatcggcacccagcacttctgtaacagctgcctctctggaagactctgctccatccagcagcaaacctgcagctcctcctgaaactactgtgtcctctgcttctagcaaattggaaactccaccgtccaagttaggagagcttctgttcccaagctctctagctggagagacgctggggagcttctcgggcctgcgtgttggccaagctgaggattctactaagccagttagtaaggcctcctccacaaacctagctggagcccagccagctaagccctcaggggttagctttcctaatacttcagtgttagggaagccagtggagcccgctgtgacctcctctgtgagccccgccccagcagcaccagcctcagctctgaatgtgagcactagcagttcctcagcaactgtctttggcagtgtgccccttaccagtgctggacctcctgggctcatcagttttggtggggctgctttggctagtagcaaagctagtttctcatttggaaaccagcagactagtagtagtacagcatcatcagctaccccaacatcgacctcagttgccccttcccttccagcatctttccctactttgtcatttggtggcctcctgagttcaccatcagcttcttccctgcccgtgtcctctggtaagagtacagaggaggcagcaccaccagctgttcctgacaagtcagacagcagtgaagtttcagcaacaacaccctcacttccagtacagccacagtcaacccaggcatctctgcaaacttctgaccctgtcaaaaaagaacctgttcttgtgcagaccacagacagcagccccagcagaccagcatcttctgccagctttgtggcatccacagagtccatgccagtaaccctaggggcccctgacagcaagatagaggcagtgtctcctgcgtccacctttgcagggcctggacaggctgctgtggcaacagctgttctcccaggagcaggctcggcagccactgaagcatcgggtacccctaccacctccactgtctccagcagtagcccaacttctgccacagagacagctgtatttgggactgccacatctggttcctcagtctttacacagccacctgctgccagttctagctcagcgttcagccagctctccagtaacacagccactgcgccctctgccacccctgtgtttgggcaagtggcagccagcataaccagcacagccgctgccacaccacaggccagcagttcagggtttggcagccctgcatttggtgcttcagctcctggagtgttcggacagacagcatttgggcagaccccagcctttgggcaagcaacaagcagccctgccagtggcttctccttcagccagcctgggttcagttccgtgcctgctttcggccagtctgtctcctctacccccgcatccaccagtgcaaatgtctttggagccacctcgagtaccagcagtcctggttccttctcatttggacaggcttctaccaatacaggagggacgctgtttggtcaaaacaaccctcctgcttttggtcagagccctggctttgggcagggaagctctgtgtttggtggcacctcggccactacctctacagcagcaccttcagggtttagcttttgtcaagcctccggtaagaatttgcagaacgttttgactttgttctcttcctgtgctatttaaaacataacaggcctccactgttcttataattagaagagctaggttctgtggttcatgcctataatcctcacttaggatagaggcaggaggatcaggagttcaaggctcttgggtacataatacattcaaagccagcccaggctatatgaaattctgtttcaaaaactaatatccaagatgaaggagggcacttggtgcccacatggcaggacctgttttgtcctgattggctgtgccctgtggctgagtattgctccagttcttttcctcagcaaactctctactttgctgaccacagactaccaatttcacaggttaaaactacgcctgtttgcttaaggccacagcaagtaatttaactcttaattacaatgttttgttttaatttagaggctctagaactgtcatactcaggcagtcagacctcatagtagacggtgcaggtgataagagtagagaggatccaggactccctgtttagttaattggctctgtggataattatttcttttgtaggaagcagccatgttgctactttgaatagcaattacacacacacaaaatgcacacattgtagagtttttgaagagaaaactggatgcttcattctgtatccaatcttagcatcgacttttacttctaaaagtttccagtaggcatggtaatgtggagaggtgttccaggtttggctttctagtggttctcttatgaaaggtaattcttgccaggcaatggtggtgaacacctttaatcccagcacttgagaggcagaggcaggatcatctcaggtagttcaaagccagcctaatctacaaatggaataccaggacagccaagttacacagagaaaccctacacagaaaacaacaacaacaacacaaagaaaagtgataattctttagcagttaggccccagaaaataaaacaaaaaataatggcttcttgttagacaggattgaacataattgctgattcattttttttttcagtgatagtttatttgaaacaacttgtaatttgttagaagaaatgtttcccttcttttaatgagtgttaaattcttaccaaaacaactataaagacacagtaggcagagaaacacaactctgaacaccaccatcccacccaccaccacctggtctcctccctgtgccctgagactgcaagcacatggcctatctgggtgaggggcatttaatgggcagggagaaggcctaagacttaaaggagagtaaaatcttgccactgcttgtcctgagcatcaaggacagaactttaaaaagtatgtacaaacatcattgagccggctcaccaaatttggagcctcccaaggggtcttgtttaaacatagaagtgcttggttagatcctggggccgacctccagttgtctgttctccgggaaactccaccctgcttagttataggcctgcatcccttgcctcacttccagttgtacctggcagaagagactccactctgatggaatccagtacttgagtgtatgtagatagggagaatgattgctggtgtgggtcactggcagtactcttgttagccaagatcgtgacggtatgccacccgccaccacctgacctggtaggagagaagagttcaatcctagggacttttagaatgctaacagtgaggtaagaacctcgcaatcggccctccacatgtatgggttctgtacctgcagatgtggccctccatggattgaaataactagggaagatctatgctgaccatgtacactttttcttgccattatccctgagcaggacagagtagcagctagttgacatagtctctccagtatacttccgtgtaccataagtcatcccaaggtgatggaagatatgtgggagcctggacacacgggctcaaacaccacagcgtgccacgtcatgaaagagactactgcatcctcagattttatatctgggtactctcagagatctagaatttatggataccaagaacagctgtgtttacatagaattttctccatttcctcagtggggaagcgttttttttttaattgttaatatatttattgacatttttgtgtgtgtttgcatgcatgtatataatacaatttgatcagaatcacatatctccagccccctatcttaccctcctctctggaacccttcctttctaacaacccctcctgctttctgtttcttttctttcttaatgactggctgagtttaacagtttgattagcttttatgaacgtaggtatgggattgcttactggatcacaaacaactatccataaatacacttctggagaaaaattactccccttctccagtagccattaactaccagtaggtcctcaactagacgtagggtgttatgagttccgccccctctgtcctggactgttagcaagcaggaaatggttcctgctgtgggcccctgagcacagcagtcatgtcgtatttagaaaacagttttactctcttcctgccgatggtcatgctcttcaattctttatacttcttgctctgtcttccaaagtattctgggagcctttagtccaacttagggtaagacaccggacagtctcttagtctcagcacagttagcagtctcttcactaaccaactgcccacttcaaaaagctgctgtgactaagactgagagcagtgttaatctgtgggtgtaagtacaagtattcagaaagaaattggacttgtctatttagcagaacaacaataatagcttctccccgccagtgtatgaccttgtcagcctgggattttaaccagtttgtttacagtgccaggaatgaatttcctcctgtggagcaggcctctaagcagaaagtgatagtttacttccatacattcatgccatggctacataaataggcctatcttttccagcggtttagtactggagcaggtacactcacccctggagaaggccagtgatggcttttacatccagtgacgttcataacacatctataggctgtgggtgttttgattgggtttgggtttgggtttgggtttaattttgatgtttaaaaaagatttctccaaattgaatctttgtctttgtgtcttacaggttttgggtctagtaatactggttctgtgtttggccaggcagccaacactggtgggtcagtctttggccaggtaagtatacatgattgtctctctctgtgtgatcatctgtctagttttttcccagtgtaatagacttagtttatgctcagggtccaggctggcaagcaaccacatacagttcctttttccttctttttcttttccttttttcttttctttttcttcttttcctttttcttttcctttttcggattctttccagacagatttctctgagttgctctggctgtcctggaactcactctgtagaccaggctggcctcgaactcagaaatctgcctgcctctgcctcccgagtgctgggattaaaggtgtgcgccaccacgctcggcacattctaattttagtacagtgatatgcgtaagcaagccctcatttctctataacggttcatttcccaacattttgaagtgagcaggtttctgtctcacaccaccgtgcccctcagctggcagtccccattgttcctctgcactgctgcctttcctaaagcctgtcttattctgcatcatcacccaatgtcagcttaactaatgtgagcagcccccaaaccacaagctggtctctgaaaggaccggattctaaacagaaagagtgcctggagcttgtgcagctctgagtcagcatgtgccccgagtgcagcatcctctgagtgtttggatgcaattcaacagtgctcatcatttcagcaacggggctaatttaggctgctcttggcagcactgggcaagtcattgtgaatgagaagtgcacagtggagagaaacgcctgtaaatcacgagtcattgctcatgacgtcacctgacactagtgaagacatcggagcttctccctgttctcaaacgatttgtaaatctgtaatgcttggtttccctgcccctggtattgagtcagacagtgcagaaagcatggcagataagcattgccacctactctaaatgcagtaaccaaagaacctcagatttgtagggagccttccagaatcagcctctcctggggctgttccagagtgtctcttccagagatggtgagagttctctttgcccatctgccctggctgtgggctgtccagccaggctgtgcctgcagttttacaatgatctctaatccttccttgcttcctattcccctcctcacccccacttgtttttttcagcagtcatccacttccagtggtggcgtgtttgggtctggaaatgctacaagagggggcggtttcttcagtggccttggaggaaaacccagccaggatgctgccaacaaaaaccccttcagctcagccggtgggggctttggatctacagctgccccaagtgagttgagaagagttttcccagctccgcgacccactcatgtcaaagcttcaaatacaaatacagaagaaacaaatacagaaagggctgaagctagagagggtcttcacctacactgctctacttttgtggttattgttgttttaataaggagtcctccttacctatgaaaggacagtagagctttggggacagatgagtgtgacaggctgcttctgttttctctcctaaggccacgctcactcttgttttctaccctgaggttacctgaaggcagtgtgacagacagcagccatgagccccacccaggcacagggcttctgctcacctgactcctctgacgctgaagtgcactagtgtgggctcgggcctgcatgtttctctgatttacctctgctgccttttcccccgaagctggatttcctagcacgtttttctccacctgatttcccatgttgtgttgatctgtctatcacggttagaaggaaaagatgctatagactgctgcagtggatggatggcaagttgtattcttgccatccttgccttacctgcttccacttaagtgctgtgttgagctgtccacattaatgagtgtagtgtctgcatctctcagctcttttcctcatattaaggcctgtggcatgaagagcaatgttttctgtctcagatttgctcttgtggttgtatggatcagggatttgttgtcctgatgtctctgctctgataacatgtggcaggattgcttggccaggcacttcctcctagatcatcaggctgtgacaggagggatttaggacctacggtgaaaggacctcagaaattgtattctcaaaaactgttctgcaggtgaacaacagaatcctgataagtaaagcaaaaataggttcatttgaaggcaggggctgagagtcctgatgtaatggaaatgcttgaccacctgtcctccgggactgaaagactctgtgtagcaaatgctgtaaaaccccggtcctttcagatgaaagtgagaaaagaacagatgtgacactcagctcacatacatgttacatgctaaacacagcccacggcatcatcactggtcatgctggttggaaattgaggtggatcccagattgtttttttttttttttaatatttatttgtttattatatgtaagtacactgtagctgtcttcagacactccagaagagggagtcagatctcattacggatggttgtgagccaccatgtggttgctgggatttgaactcgggacctttggaagagcagtcgagtgctcttacccactgagccatctcaccagcccgaggccgtgttatttaccagccagtttgttaatggcttagatgtgtcatatccctgtaagcatccgtctgcaccagtccatctctggcaccatggcttttgctcgtcagctggccttctcccagaggtcagtctgagctagtgtgcactagcccatggaagtcgaccttgtacatccctgcccatgcccaattatgtgtctgaagtcagctgaaaagagtgttgaccgagagggagtgagcacccctgactcccctctctgtgggtggttgttaaacagcctccataccagacagctggtggtcttaatggttttttatgatttcttaagtaaagggatcagggtcttattaaaccctaggaccaagtccatgcaggctagtgagaggcaggagctggaagagctgagctgcatccttctccagtctgcagtgactgccttgctccctgttgactctggcatcccatgctcacaagcactgctgttctcctggttgaagtccatgagtttcctgcccacctgtcacagaggccttctccattaccgtggtcacagccccaccccatgcccaactttgttatggtcgggaaatccatctcaaatcaaatattcttaagctgcttttcttttgcagcttaagttctgatgcagaaatctttggcagcttcctaccaatgataggatagagtctgagctcacttcagtctagatgaccaagacagacaatctgagaagactgtagtaggagatgggggtatcatgtgatgtctgtgtatacatacatatacatatacatgtatatgtatgtatgtatatatatgtgtgtgtgtgtgtgtctacacatgtccaaggaaaaatgtttttgaaacattgaccatttcttcacggtgaagacgttttaaaaatgctattagctttaaaaacataaactgtacacgcacgccattacccatagcagcttctccctgccttgtcatgggtgtaaacaaatttcaacaaaacgggggctggagagatggctcagctgttaaaaagcaccaactgctcttccagaggtcctgagttcaattcccagcaaccacatggtggctcacaaccatctgtaatgagatctgacgccctcttctggtgtacatgaagatagagaccatgtactcatatacattaaataaataaacttttaaaaaaaaattttttttttcaacaaaacatagtcatccaaacgctgtaaggacttagggattattcctgaccccgcctctctcctccttgggtcagagagcagtggcaggactctgcacagcccaagcagcagccagcatgctggcagccctgtgctgggccacaccctgctctgactctgagtcttgtagtttgacatgagagagatgtgatctggccttgttgtatagacgtttaagcacaggaggcaagcactggttgcccttggtggatggaccaagacctctgggagacctgcacctgagtgtcggtgatttcagacccagcatctgcagctctgctgggctgtgccattgctcctgtccagagactcggctgatctgactcctttctgtcttctgagcttctcctattcaagctccctcacacctgttcttgttccctttagatacctctaatctgtttggaaacagtggagctaagacatttggagggtttggcagctcatccttcggggaacagaagcctgccggcacattcagctctggcggtgggagcgtagcatcccaaggttttggattttccactccaaataaaacaggtaacccgcgagtgagccatgctcatctgtgtgcgtgtgtgaatgacttgtgagcttatagaaggtgcccctttggaggcaacatccttgtgtgcttatctcaaggggctgggatcacagtaagaagtcactttgttctccagtgtatttttatatttattgagaatctactgcatttctaatacataagacgtgcttttaaaaaaagagagagaaactgggctggagagatggctcagcggttaagagcactgactgttcttccagaggtcctgaattcaattcccagcaaccacatggtggctcacaaccatctgtaaccctctactagtatgtctgaacccaactacagtgtactcatataaataaaataaatctttgaaaaaaaaattttaaaaagaggagagagagagagagaaaccagatgtggtggcatactcctttaatcccagctctccagaggcaaaggcaggcagatctctgagtttgaggacatcctgatctcatgaatgagaccctgtctgcaaaaacaaaacaaaacaaaacaaatgtcttttataaagaggagatatgtaatatagcacttaaaagaatgtaatattctcagagtccgtctcacagtgctgaaggctcaggccctcgtccctgggccgcctttccatcccaagtcattggtttaggcgtttgtctgagtgttttctctgaggtagtatctccctgtacaagcaaagctgccctgaattcatgatactttgtctcaacctcctggacactgggatcatgggtctgggccaccctttttaatcttttactagaaatacacatctataaaattttaaataatttttatacattttcattaaaggtcctaaaaggtgcattattatgaaatgtgttatatgtttgtttattttatgtgtgggaatgtttgccttcatgtgtatctgtgaaccgtgtggatcctggtgttcatggaggtcagaacatggagctggataccttggaaatggagttacagatagttgtgagctgctacatgggtgtgggaatcgaacctaggtcctgaaagagcagccgttgtttttctttttttaagtttatttattttattttatgtatatgagtacactgtagctatacagatggttgtgagccatcatgtggttgctgggaattgaatttaggacctctgctcgctctgggcggcccctcttgttctggcccaaagatttatttattattataaatacaccatagctatcttcagacacaccagaagagggcgtcagatctcattacagatggttgtgagccaccatgtggttgtaggatttgaactcaggaccttcagaagagcagttagtgctctgaaccgctgagccagctctcctgctccatgaaacacattgttaaattctgtcacctgcctgtctgcagtctgtcactgcctgcaatgctggtcttattggtgggagactggagtgagggttttgggagggggcaggatggtcctctggaaagggagccgagcctctagcaatctgtcctcctcgggagtgggcagtactgtttgcccttggatggatggcctgttttgaatagttccctgcctgaggaggtgacgctgatcttggagtggctgacccagattagaaagtgaccctgaggtgcagtggcttttagattcatgctgtgtttctttctaaaaccctggcttgacaactgagtcctaggttactagttcttagcatcttttccttagaatttggtaaaaggtactagaaataggcattgcaacttcgtttgggggctacatacagaataattaaaaaatgaaaaggacacagcttttagctctaatacaaggacaagtttggagctggtggtactgacagtcagcatggccacttggcaacctttctttttttttttttcttttttctttttcaaggcagggtttctctgtatagcactggctgtcctggaactcactttgtagaccaggctggcctcgaactcagaaatccgcctgcctctgcctccccagtgctgggattaaaggtgtgcaccaccacgcccggcttctttttttggggaggggggtgcaacctttcttaaaaaacaaactgggtggctcctgatcagtggcctcccacacagctcatgacatgtacacaaggaaatcaaataagcatgaacacttgagaaatgttacattgttaaccactgagcctttctatctttttaggcacctgatgtttcctttacttcttctgttctgggttctggggtgtggctctgtgttccacattgtcctggtggacttaaattgagaagctggtgaatgtgttttctgtcttagaaaaaatatacctcccacctagacatttgttttcctaattctggcttttctatttggtgagcatctagaatgaggactgacagggacccaggcatctgagcagacagaggagaatgtctgccctgcactcagcttgcccacgcgctcagtgagcactgtcctgaaggtggattgaaggacttggacagaaggctggggtgcactcagtgggagtacgtgcgctcaggagcctgtgaggggatcagtcagacttccagctcaaaggagcagcatcagcccctcactgtaaaagcgatttcaggcagagcctttggatgagcctttgaaaactcgtgtctgttcctcctcccttcagaaaacactgtgtcagagctaacgctattggaggccaccacagaagggacaggagacgaacctcaccatggcctcacagccagccagcccggggtctgcaggcgtttcttcgtcagttagaaagcaggacacatgacagggccatgagaggttccaatcccagctctgccacctacccatgctgcagttagatgagaaggtaatctgagagcttggcaccactggaggaagggcccaggccagccaggagagggtgggagctgccttgatgcagctgccaccgcccctggaagcccagagactggagtgtctggccagcaaacctgcttcttggttgctcagtcagacactcagcctgcagctgagctcctgctctctcattggagggagtcgcctgaccccagaactaacaccaaagcagccattctctcatttagctacacaccaagtttgttttgcttttgcacgtgtgcctgcctgtctgtttgctggctctcctgccagctcctctccaggttaatttcttgggtcataaaacctctcatttttttgctcacattccagcaagaagtctaaacaatattgaatacgaggtgcgagatgtaaccttgtatgtctaggaagaaagtgcaactagatctgtggtcaatttaaataattaaaggacaatggttttttagcactttttttccattctgtttatgtttgtaagccaccagtctccgtagcacagcctggaatttcactcaaggttttaaaagacagagtagtaacccaaacacgagccacggcaatgtctcctcagctgtgcagccctgtgaacgatagacacagaattcaattgcaagtagcagccgctgctcgcctgactgctctcatgccctacatttgatcttctgatcacggtggcaggagcgggtgtgaggacgataaagcagatccgccacttgaacaggagatttgctgtcagcagtaatgaccctgcctctaatctgagctcagcataccctcactacccttctcttctgaacctcagaactagagcaaatcttggaggtttggggatacctcaggaacagtcccaggaggctgcctggtgctggacctgacccagttctgttgtctccgtcttgcctgtaatggcctagagtcctgatctgggcgcttaggccatcctcacagccatcttaacacctggtcacatttatactgtagccttcatccaaaatgagagtcagtgcgctttatagtcatgccacaagtcagggacattggtgataggcccacagccacttgcctgtaaataaataaaaggtatgtggctgggtgccagcctgcaccaccctgcttctgttgtgacccagttcatgggttctgccagggaaggggctttgaacctccgactttattagctgggtttagttagtctttacatattcttaaaatttcaatctctttaaaatatccatctcttttaaaaatccaaagtctttttaaattaaaagtctcttaactgtgggcatcactaaaacagtttcttccttcaagagggaaaatatcagggcacagtcacaatcaaaagcaaaaatcaatctccaaccgtccaatgtctgggatccaactcacgatcttctgggctcctccaagggcttgggtcacttctccagccatgccctttggacatgaaactaggagcctgctgtgtgtattagtaaacagtaaagcctgtcaccctgccactgctggttgagacactagctttggggatgggtttctatgaagagtcacagatatcatggggctagaaagcaacctgcaatggacctgctgtgtttaaggtggtttgttctcaacaggacttgagataggttccacctgcctcagggaggcattagggtgctcagatctcttagtgccacagaccctctgctcctagtgggaggagccgtgtggctgagggattgaggttggggtattgtgctttttggcttcttgtgttggaattactgacgtcctctctccctttctcctcttttgatttggtttctgactgcttgatgccttctttcctgtctccttttctttctccctgttctgtttgcctctgttttgctcaggtggcttcggtgctgctccagtgtttggcagccctcctacttttgggggatcccctgggtttggaggggtgccagcattcggttcagccccagcctttacaagccctctgggctcgacgggaggcaaagtgttcggagagggtactgcggctgccagcgcaggcggattcgggtaagctgcaggtgggacctgggaaaaccacaaacttgtgccagcccaaagcaccagggcctgtcattcttacattctctaaaccacacagtgacctggcggccttgcctttaagtagacaaaaaaagttgctagatgtctttttctcaggacaaggcacattgtgagcaggttcttaaatcattggccacagcattgctggctgtcagtgcacagcatgcaggacatcaataacctgttctctggaccaggtttagctgcagccaggtctgtttctcaggtggtccttatattagaaagtcctgaagaaagagttaggattgttttcttgaggtgccagttggtctttagcaaacaactcctagaacataggacaccaatgggataacccccactcaagactgctgttctcttggctgtcaacagctgctctatacacatcctacacacatcctcattagaaaatcccatgactggggctagagagatggctcagcagttaaaagcactgaccaatgttccaggggactcaggttcaaatcctagcacccacatggcagctcacaattgtctgtagctccaagatctgataccctcatacagatgtacatgcaggcaaaacaacaacatatataaaataaaaattaaataaagatgaaaataccaaaaagaagggggagtttcttctagtggccctagaattttagtctcattgccagaaccccaagaagtagcctttgcggcactgtaccgtctcaactaagtatatatatatatgtggtgaagtctacagagagtccctcatctgaaggagagactgatgcctaaagtagacccagacggactcatcctcagtgctcagctcaggacagggatctgaaggggaagagtaacatgggtgttggacatgagccagcagcggctttatcctgaaaagagatcacattcttaacaaactcggctccacagagggatgctagagcattcaggaagagcatgcaagaggacaggcacgcctcagatttcttgtacaggctaaggaatcttggtcatttatccttggggaaactccaagaacaacagttaaagagaacttccagaagggagagttgagaagtgctctaagcctgtgttttacacagttctggatggactccatctgtatacactgtgaatcttaaggttttgttaagttacttgaaagcagctgtttgctttactagcagagaagtctcttgagggttgtaagtgtagctctatggtagggacttactgggtgccctcccattcctaagtgagtccccagcaccacattcacagtgctagcgtttctccacatgggtaacaggcacctattgaggatgctgaagaagtagggttgtagactctgaagctagcacaggctacataggaagaccctgtgccaaatagtaatgataaagaatttaaaatagagctggggggctggagagttggctcagcagttaagagcattgactgctcttccagaggccctgagttcaaagcccagcaacaacatggtggctcacaaccatctgtaatgggatctgacaccctcttctggtgtgtctgaggagatcaacagtgtactcacatatatgaaatgaataaataaatctttaaaaaatgaatagaattgggaagatagttcagtcaataaataccacgaaagcataaagacctgagtccaattcccagcacccacataaaaagctgagcaggacagcatgtggttggggttcccatactgaggaggcatgtcttggaggcttgccagacactgagtctcagccccaggtctcagtgaaaccctgtctgtaaaaataaggtggtgtcatgcagtggtggtgcatgcctttaaccccagcacttgggaggcagaggcaggcggatctcttgagtttgaggccagcctgatccacagagtgagttccaggacagccagggggctacacagaggaatcctgtctcgaaaaactaaaaaataaataaatatatatatataatatctaggtcacttaggctgacccacacgcatgggaggttagaggagagaacggaatatcttagtaatcatgactgactggcacattttctagggctagtaaaacgtaccagcacagacattcaatctctgggaaaacaattgtgtgcctggtcactggtggtagcctaaccctgacagagatctcaggtcagccctagagtaggagcacagggacagctggacacctgggagcagtgcagagaggccctggtgtatgaggccatggactgcctggcttccctttgtaacttaggcatttagcctatcctgtctccttccaagaaacaccaactcctctctccctgacctcttggggacccccactgaacccctcaaaatgtcttaggttatatcttcaaccccatttggtcaagcaaatctggaaggagaacccttgaacgaggattgttctaggtgaggtagcaggagagagaaaatttctccgttgcttcgtgtatttattgatttttatgaaacacaattctgcgtgaaataacttgtaaagtgtcccctcacacacacacgaaagggaaacatgatgacttatcttcatatctcatatgcagggggcccttggtaaaccaagtcattaaagcagataggccaccgataggcttagtaagtaaaagcactcacctcaccgtgaaagctgctgcctcaaaccatgatggaaggaaagaatgtattctctacagttgtcctctgaccaccatgacactctgtcacacgcatgccagcatccgcacacacatcacacacacgtagtcttactaaaaagtgagtggagagctgggcatgcagctcagtgggaggcgtgctgagccctcaggaagccttagcttgcacttcgcactgtaaccaggtgtggtgacacacatcccagcaaaggatagaaggagtggaatcaccagactccacagcactagcttgtgaaaccagccctcaggaggctgaagcaggaggagtatttgaggccagcataggcaacatagagtcgccaaggcagagggggactggcagggatgaggccacgcaggtggtgaagagatgagaatgtcgctctcagtgagggtgtccaggaggagagcgggaagtgtgtttgctctcagggacctggagttagtcagtgctaaggactcaggtccccaggtggatctcacactatgtttctgatgtcttccttctcagagccacggtaaaggcttactctgggctagaagccggtttcctctgagtctgttgactcggtccaagcttgtcaccacagctcctgtgtggtacatccaagacaggtgacagtgagtgaggtgtgggcagcatgaggactagggccatgacaaccctgtcccattctcaccgcacccaggttcgggagcagcggcaatactgcatccttcggtaccctcgccagtcagaacgcacccaccttcgggtccttgtcccagcagacctcaggctttgggaccccgagcagtggattcgctgggtttggatcgggcacaggaggtaaacagctgtgttctttcctcccacagaagaataggtgttcctggacactcagcccagggtcttaaaaactgaagtgacaaaaaaaaaaaaaacattggttaaatagactggcaacattgtgccatttctgaaaaattcaaagaaattactgagttcactttctgttagaattttagaactaatctgtacagtgctctgcatcttcagagagcaaatatatgtgtcctgtgttgtcctcacacagagctcagcaaagttgtgacttttttttaacaaatacagaactggctgcagaggctgactgatgctcagaaccccgtgtggcatctgagccagacctaaagtgtctgcctttctgctctcaaaaggaaaggaatcagattaattatcaataaaagaaaccacttgtgttgtcccataagatgatgcagggcagcagtgcacagaccgttacctgcagccagagctgaggacctaaaatagtgaggaggggctgactgtaccctcagtcacctagtagaattgggttggggaaggcttgtcaggagccaagcaggacagagcctgcatagctgagaggccctcagctctcggctctgacatcctcctttctgtgtttcagccttcacctttggatcatctaactcgtaagtacttgtctgccctgtggtctgccctcacttaactcagtcaaatggcccagggagggggaagtctcggccatgctggacttgtgtgatgtgctgtttctgtttgcagagccaggctaaagagccaggttagcagcaggtgttgggtttagggctgccggcctgcgggaggctgagtaagagatgattggccttcccggcagcagggcgtggagacacttgcctcatttctgtggtggtgtctccagctgcctgctactgaaggctccaggcccaactcgaggcttgtgtgttgatcctctctgcacttcttgcaggtctgtccagggcttcggtggctggagaagctgagctgatgtcagcattccctcaagttcctgtgagctcctgtgcgcatccctccacagcaacagactgtcaaaagaactttctcatgaaaacgctcagccaggaagaaacactggagaccaaagctcagcaatgcttaactaactgcctgttccccgctttcaaattttacatcaagtttttcgtctgctattaaagtgtttggtctggttctgcacagaacatctgggtatttatttgggtcacagccagagacattcctatggcttgaggaaaccaagccagtggtctctgcccagtggcattctgagtagagcccctctacatggaaaagagcagaatgtggcagacacctccccacgttaatgtctatgccacatgttctgtggttccatgtcaggctcctgtgagggccccttccttcacagccagttctaagacaggtatggcaaacagaccagggaggcagccgctgagctgcctgtcacctgccaccctgtctctgctcctgcatgctctgcatctgctgccagttcccagtgcagaggcagtctgctgatcgtctccatacacagcatttgcagacctacaaacaccacgtccttccttcactgtttggaacccacgacttacggggacatcaacaagtcgctgcaggcttggacagtgtgcgaatccattttagacatgcttctttctctgggtgcgttagctttgagggcctggcatgttctgctccttgggctgtggagtcctgtgctaccaaagcctctgcagagaccatctgtcacctttcaggttcacaacatggcactgctctggactgggtcaagggcagagggaagagctgtgggttggggtttgtcatactggaaaggttttggttcctttgttgttcaggggttgttcttgtttttgagacagggcttccctgtgtagctggctgtcctggaacttgctctgtagaccaggctggccttgaactcagagaactgcctacctctgtctcctgagtgctgggattaaaggcatgcccactaccaccttgctaagatgctgttttgtaatgctttaaggtcatggtgcagtcagtgtgactgtggtcctattggcttttgtgtcccccatgccacagcttgctcaggtgtgcccttatgtctcagccttggcctcagacagggagttcaagcctccatccatccttattcaggggaagaacatgaccatcagggatgggcgctcccccagagtgttcagtggcttcttatcatctcaagaggaatctgccctgctgggttcctaaccagccatcaccagagccaagacaagacctagaattaggcacagggtccacccggactgtcacccattctctgtgccacagagacttgtctgcatgcttcactcattaggggctctgcctcttctgaggagctggagccttgagagcctcagtgtggcctccttttggtcctttgggaattgaagagccaggcaccgcttgaggcccctctgcccggaagcaggtctgtctctccgtatgcttggaactttgccgaccaggtctctcagaccaagggatcgccaggcttctttttgtgtcagggtctcactctgcagccctggctggcttcaaactctctgatccaccctttccgatatatatcaagtgctgggaagaaaggcacttgctccaggctttctgggtttgatggggaacattcatggatgaggactataactgggtaaagagagggaagagcccgttttgttacctgaagaggaagactgagattaaaaatggaaatgaaggagttagtgaactgagaaaattcaactgaggtaatttccaagggtgccatagtcctgcttcaagcattgagttgttacacttgacaaagcagcaggacagagatcaggtggcggggggcggggggggggtcctccttcaggcaagagggtctgtaggtacttcctgctgtcagtggacttcagccagccacagaggtgaggggaggtgacacacccaattgtgtgatcagattatatatatatcttataaagtaggtgcccagagaaagcttaatattttttttaaagatttatttatttatttattatatgtaagtacactgtagctgtcttcagacactccagaagagggcgtcagatcttgttacagatggttgtgagccaccatgtggttgctgggatttgaactcgggaccttcggaagagcagtcgggtgctcttacccactgagccatctcacgagcccgagaaagcttaatattaaactcacatctctcattgacaattctagaatgacaggaactcaccaaccacaataaccatggccaagggagtgaggatgccttggggactcactcctttcacagttagtgttggccagcttttcaggctggccgaccacacctgtcctgacgccctgcatgctgaaggcaggctggagggcccacagtagctctgccccatcagagcctcaacttggaacagttctgagcacagacctacgcctcttaccaaatccctgtgtgcttatgggggggagggggggcatactgctgaccatgggtcaggagtccacacttccccctaaagtgagaatctgtggaagcatactcaatgtcacaagatccagtcctgtacatgggaatgacagtcaccaccactgagttctagctcaatgcaagtgctctcaggtactgtcattgctcaggcccggccacctgctgggcagcatcctacccctcactactactctggaggctgaattctagccagagctgctgaggctcagtgctgagttagttggtctccatggtccacaccctccctgcggtgccggagacctgacccagaaacttctgtggaggctgccgaaatagcaaaagcaaggcagcagggaagccctgagacaggttcagccactgtgcacatgtgtgcacagggaaagagctcctggacttaatgggagtctgtctctgagaaaccaaacgatggcctctaccactgtgaccacctgaagcactaacttcattttacatctgggaaagcaaaacagaccatgatgagagagcttagaaaaatccgttttctccctcctcctcaagctccatgaagcccagctccctcccagcccagcatcctgaacttcaatgggacatgcactgagctgctggctcgacctggccacctatcaatgtaatccaccccaaaaaaagagctagagggggctgacagcagcagcacattcctcctgtgcctcactaagcacgacagtaagtgctggagtgttttctggcagagcacagctgatacggcctatggagcgatgtcaaatgctgtctcaatggaggattagtgtggagaatttgaggtcaagggtttaggctgaactgccttctatgtatagaaaggagcctgtaagggaatacaagggcagatgaaagccttggctgggtgggggtagacaggatgacatgccaaggcagaacagagctagttacccagttacatagacctcctgtgagcttccctatcacaactgcagtccccttggtctgagagacctggtcggcaaagtttcaagcatatggagagacagacctgcttccgggcagaggggcctcaagcggtgcctggctcttcaattcccaaaggaccaaaaggagcccacactgaggctctcaaggctccagctcctcagaagaggcagagcccctaatgagtaaagcatgcagacaagtctctgtggtacagagaatgggtgacagtccgggtggaccctgtgcctaattctaggtcttgtcttggctctggtgatggctggttaggaacctcttgagatgataagaagccactgaacactccgggggagcgcccatccctgatggtcatgttcttcccctgaataaggatggatggaggcttgaactccctgtctgaggccaaggctgagacataagggcacacctgagcaagctgtggcatgggggacacaaaagccaataggaccacagtcacactgactgcaccatgaccttaaagcattacaaaacagcatcttagcaaggtggtagtgggcatgcctttaatcccagcactcaggagacagaggtaggcagttctctgagttcaaggccagcctggtctacagagcaagttccaggacagccagctacacagggaagccctgtctcaaaaacaagaacaacccctgaacaacaaaggaaccaaaacctttccagtatgacaaaccccaacacacagctcttccctctgcccttgacccagtccagagcagtgccatgttgtgaacctgaaaggtgacagatggtctctgcagaggctttggtagcacaggactccacagcccaaggagcagaacatgccaggccctcaaagataacgcacccagagaaagaaacatgtctaaaatggaattgtgcggacaaggccacctggcaaacttgtcaagcccacgttgtcccagagccagacctgttcggctcaagtggacataacttgctgtgtctaagcccctgatggcagcagccccacagcctcagctgttgggtccacccttctcttgctgtgtctggactaaaagaggtcattccacagacgagttaaggctgcagttgctgctttatcccctttccgcttataaatagaagtcgttcataccaacgccctggatggagatgctcagcgtggtttgggggtctaggattggcagcatcggagactctaggcaaggggcgacaactagaaggcaggagcctagctacatctcagtcctgctccatcttgctgccacagctggtcttaaaacctcgatcacagatgcagcctggcctctccctgtggtttgaagggaccttggatgaccatgtccctctttccaggccctgtgacctctctcccttccttgtcccgcttgcctcactccctgatggctccaaggctgcattgtctgcttcccttctgtctcattgggcctcaaaactctcctggtgtccacacctcccaaaggtctcagtgtaggagcataaagcctctcccaaaagccccttgggccaccttcctagtcctctctagtatcctagctggataagaggcatgctgcgttcctctttgtgtccttggctatttgacttattcagctactgtctccttgaggccccacccatggtggtcagccccataagaagcatatttatcttttcctagtccctggcagtgctgaaagctagaaccaactcaaaagcctcagtaggtgcctggtttgagtgggatggtcttaaggtagtccaggaaccccaaaacagccaacagcactctgctctttcgggtttccacctttaggaaggcgtgagctctgggtggagcaccctttgtgatatgagacttcctgagctagaaccacttcacctgccacttgtctctgtttcttccctagagatgcccaggatagaacaaaccactcctaccctccccaccatgaacacacagctgacagcctcctcctcatcccagagctgaccagatctcagaaatgaggttgactgtcccagaaggagggacatgccttgggctaaaagatgccttcctccttatctgcacttggatcttcctagtctaggaggattcaaggctagccccctaggacgggatccttcatcctcactgcaactgcagctagccagggctgcagagaagagaggagcaggccaggctggtttgaagcctttagccactgctgccgctgctgtgaggggcttcttgagccgatggagcaacatggctgtcaccagcaagtcacatcttgagctcttgattgccccattgtccatccttcctcaggacagggagatggtactgctatagttatgttgcagggacctcagaaaggaggctccacagtgcagctagtgcgtgctccctcagaccccagggctggctgctgggagccagggtctctacttatcaaactaaatccctgaaatatgggaactctggttcccttcccacgggggtttaggtccttcgcaacacattgaccactcactgaggtcttcaaaggtcttcttctcacactgggccactctgaaaacagaattaactactctgaggcattcaagccaagtggtgttggggcatcataagcagacccactcctctgtggaccaagatcccacagggcagcatgctccgggtgagcctccagatctgaagacacaggccctgcagctccacgcagccccgcaccgcagccccgcaccgcagccccacactggtccctcacaagcccccgaatgctcaagcacagcaggtgctccctggaaagtggggagtccctgcggtgttacactgtgaggttgatgactcctgagatgtaccacctcgttcttaggccagtgccataattaccaaacttctcttcctttctttccccctctaagtgctggttatttggttctttaaaaccaaaaaaaaaaaaaaaaaaaaaaaaaatttctttcaatttttggagacaaagtctcttactgtgtctggcctttgacctccagcccctcaacctttcgggttcttggatgactttgttttgagacagggtttctcttgtgtagccctggctgtcctggaacttgctctgaagaccagactggatgttgccctgctgctaagatcaaagtctgacgttaaccagacagccctgagctcaatgcaaaacgacagactccctttgtcatggggcttcttttcagggggtgggtagggggaatcctggacccctcctaaggaatgtcaggtagtcctgcatctgagactcctggaccgcctcccagtgccagtgaggcagcttagcagccttcagccaatgacctttgcccactctggatggtctcatccccttccccaaaccacgtatcccttagttcaccctgagtaaagtgtatgcatacaaacccaccccaaagaaggaaatacgcacaagccaagatcatcccggagagctgtttcattgaagatctttttacctaaaagagctgtaacactaaggtcccaagagagtctctctccctatccccaagaaattcgctctcaaacagacccaggatgctgcccattccagactcccatttcatccttccagatggttgtacagaggcatctggactccctgaggaagctgaggacgcaggaccccaggcctcaaactcaaagatctgtctgcctctgcctccggagtgctgggattaaaggcgtgtactacctttgagctgagctgctaccttggttatttctaatttggctttcctctggaaagtacaggacggttctgacccataatctttccttgggtgaactgagctgtactctcccttttccaacaagatgaatgggtgggaggcaggtctgccctctcatgtaagaaactcaagtctactcggaacagctgacctcgaccatcgaagaaaaggagggtgaccctgagaccccagagggaaataggggagacctgcagttgctgaggttacagctctggagaaagttccagaccacagtgcaggacagaggttagatggaggctagcaggctgactggttcatcagcagagtcctagagaggacagtcacacagaacaatggatatctgaagagcccccacaagtgataagggctgaccagcacatgcagggagggagacgaggtgacttagaggcgacctgcagagatccagagcaagaactatgctgcagccagttagactatcagaaggactaactcccccaagcactgagctcacacttggggttgccagttttacaccgaatgtcactcagtcactaaggagtttaaaagcaagatacaagtgaatccaactattcccacaccaggtcccagaattgaacttgccggtgtggcttggggaagtgttagcctagagcacaaagatctgggatcagacactacataaaccaggcatgactgtgattccagcaccctggagatggaagcagctaagatcaccctcagtcgcatagagaattaaaggccagcctgagctatgtgagaccctccctcccccaccctccaaaaagaaaggaagctaaaacatgaaacaaacacagattccagaactcagtttcagaacactatgggaacacaaaaggacctatcatataacatgctaaatctcaaagcatctagcgtctgaccagaaattacccagcatgcaaagcagcagagaaacacattctcggaggaaaccagaaagaccactgttaacatctgaaattctgcacttgcaggaaaggcacagtcaagattttcctgcaggcccaacatgaacataatggtccccagcagaggcccccccccccccgcaatgggtccccagcagaacccccccctagtgcgacagaggggtaacgtgatgctgcagagtgtggcagccatgtctgtgcaacagcagtgcagggggcagggtcaccagaccctctccccaggtggaagcttgactgagcgtggaactccagtgatgttgtcacaaagtcctacccatgctggggtgtgactttacagtgtcaaatcctggaaactgcccacacttctacaaataaatgcaataatttcattgggtcaccaagcaggaccagaacagcattgtttcctttagcctgctctctcttatcaggggtaaatagatatttagttgttcatttctctccaggacaatgaatgcaacaaagagaccagaagaaagatgaacatgctgtttgggctagaggcttagcagagaagggagttttctgccaagcctcatgatctgagttcaatcgagaaaatccactccacaggttgttctctgacctacgcacgcatgcacacacgcacacgcattcacacactcatgtatgtgctacacaagggtatgggagctacaaaagcaatctatttgaacttctagagatgaaaactacagtctctgagatgagactctcctggaaggaataaacaaaagagggaaagattaggagccatgaagaccttgctgtcagcctgagatggagaagtccccaccccaggtctcctgctgttacgccacagatatgtctggatacatgatgtggccacaatcaaagtcattgtaaggagagctgagtcactgaacttcagagtaggctgcccagaggtagtcccctcacagggaccttgctctggcacggctctattgtccatttcaaaggctgttcttttaaatagcagtggaagcaacacaaaatgaagtcatacagaaagacaacttcctgtgggctggagccctggaggagtgcaggaagcctgatggtgtgggcccacactcctaacccctgggaggtgagaggggaaattcagggtcttccttggctatatagcaagtttgaggctagcctgggctatatgagatcctaactcaagaaaaagaaaatgtagctgggccgtggtggcacacacctttaatcccagcactcggaaggcagaggcaggcagattcctgagttcgaggccagcctggtctacagagtgagttccaggacagccatggctatacagagaaaccctgtcttgaaaaaccaaaaacaaacaaacaaacaaacaattgttaaataagatactggcacagactactacatgaatgtctacagttaaaaaggctatctcaggggagcggcaagtgggtggagggtcggtggcaccagattatggtcagatatctgtggcaggctgctgcacacacagtaactttgtctaataacagagcataggtttcaaagagctggaaggaagtattttgaatgtttctaccagaaataaatgatctatgttggaggatgtgtacgtgttccacctgagttaaacatacacatgtacagaaactctatgtggtcccctgagccagtcctcttgtcagtcaacggggtctgtgatggggagggggactgagggtcaagagactcgaagaatagaaacaaaacaggatatcaaggatcagtctcaagtctcatttgttgaaaggcaacaatgggtgtatatgcactcgctggggagtgcagctggagacacttttaaccacaggttcaggatgtgtaggagaaaaacaagatgttatcagagtgttcagctgtggtgggtttctctaacccacctgta

SEQ ID NO: 1171 - DNA, 6554 bp, Mus musculus
ctgtgtttgaaaggccgcgggtggcagcggcagcgccagcagcagctacttgaacaccctgaaggcggcacgatgggagacgagatggatgccatgatccctgagcgggagatgaaggactttcagtttagagcactgaagaaagtgaggatctttgactctcctgaagagttgcccaaggagcgctcgagtgtgcttaccatatccaataagtatggtatgctcttcgctggtggcaccaatggcttgaatgtttttcctactaaaagccttcttatccaaaataaacctggagatgatcccaataaaattgttgacacaattcaaggcttgaatgttcctatgaaattcccagtccatcacctagcactgagctgtgatagtcttacactctctgcctgcatgatgtctagtgaatacggctccattatagctttttttgatgttcgcacattttcaaatcaggctaaaccattgaaacgtccatttacctatcacaaggtttcaaacgatgccagcggaatggtgaatgatatgaagtggaaccccactgtcccttccatggtggcagtttgtctggctgatggcagtatttctgtcttgcaagttacagatgtggtgaaagtatgcgccacacttcctccttccacaggagtcacatgtgtatgctggagccccaaaggaaagcagctggcagtaggaaagcagaatggaactgtggtccagtaccttcctactttgcaggaaaaaaaggtcattccatgtcctccattttatgagtcagatcatcctgtcagagttctggatgtgctatggattggtacatatgtcttcacgatagtctatgctggtgcagatggaaccttggagacctgtccagatgtggtgatggctctactcccgaaaaaagaagaaaagcatccagaaatatttgtgaacttcatggagccctgctacagcagctgcacagagagacaacatcattactacctcagctacatcgaggagtgggatttagtgctggcagcatctgcagcttctacagaagttagcatccttgctcgacaaaatgatcagactaattgggaatcttggctgctggaggactctagtcgagctgaactgcctgtgacagacaagagtgatgactccttgcccatgggtgttgccatagattataccaatgaagtggaagtcaccatcaatgaagaaaagactcttccgcctgctccggttctcctgttactttcaacagatggtgtgctttgtccattttatatgatcaaccaaaatcctggggttaggtccctaatcaagaccttggaactgatctcaacagaaggagagcgacagcctaagtcctcaggaagttttcctggtacttcatctttccctaaagctccacaaaacctggaagctccagaaacatcctcttcggatcttccacctgcgtacgctgctcacacttacaccttcgctatgccctatgattcacgaagcccttctgtggtctcctttggcccttcatgcatcaagtcttctgcttctgtcaccggggagcccccactgtaccccactggatccgacagctcccagagcagcaccaggctctggcacctccactttctcttttgctcctccttccaaaggctccctggcgtcgacccctgcagtggctcctgtggccacatctgctgctcccttcacttttggttttaagcccaccttggaaagcacacctatgtccagtaccccaaacacagggatgaagccttcgttccctccctcggcctcttcggtgaaagtcaacctgaatgagaagttcaccgctgtggcctcctctgcacctgttcatagctccacgagcacaccctccgtgttgccgttctcctcctccccgaagccaacggcttctggaccactcagccatcctacgcctctcccagcatcatccagctccatgcctttgaagtcttcggtctctccctcgccagcagctggccgctccactcagactgcgccaagttcagcaccctccacagggcagaaatcacccagggtaaaccctccagtgccaaagtcaggttcttctcaggccaaggcacttcagcctcctgtcacagagaaacagaggcctcagtggaaagactcagaccccgtgctggctgggattggagaggagattgcacacttccagaaagaactagaggagttaaaggcccggaccgccaaagcctgtctccaggttggcacctcagaagagatgaagatgctgcggacagagtcagatgacttgcacacctttctttttgagattagagagaccacagagtctcttcatggagacataagtactctgaaaacaactttgctggagggctttgctggggtcgaagaagccagagaacagcacggaagaaatcacgactctgggtatctccacctgctttataaaagaccgctggatcccaagagcgaggcccagctccaggaaattcgccgccttcaccagtacgtgaaatttgctgtccaggatgtgaatgacgtcctagacttagagtgggatcggcatctggagcagaagaagagacagaggcgcctaattgtgccagaacgagagacacttttcaacacgctagccaacaaccgggagatcatcaaccagcagaggaagaggctgaatcagctggtggacagtctgcagcagctccgtctctataaccacacggccccgtggagcctgccctcagcgctctcaactcagagcaacagtcacagttttgacagtgaccttgaatgcctgctaaaaactaccattgaatctcacaccaagccttctcccagagtgccaggtaaattgtccccggcgaaacaggcccaactgaggaacttcttggccaaaaggaagaccccaccagtgaggtctactgctccagccagcctgtcccggtcagccttcctatctcagaggtactatgaagacttagatgaaggcagctccgcgtcatccgtagctcagcctctggagggagaagatgcccggccaacctgcacatctgtagctcagcctctggagggagaagatgcccagccaatctgcaaagaggaagaggctgtggtcccagtacctcggcatgcccctgtggtccgcacaccttctatccaacccagtctcctgcctcagtcgatgccctttgcaaagcctcacctgatccatagttcttcacctgccgtgatgagctctgcagtctctacgtcagccaccaaagttattcctcagggagcagacagcacaatgctggcaactaaaacagtaaagcacggtgcaccaggtccttcccacactgttgcagctccccaggccgcagctgctgcagccctaagacggcagatggccagtcaggcaccagctatgagcactctgaccgaatcaactctgaagactgtccctcaggtggtgaatgtacaggaactgaggagtaatccctcgcccccatctgcggccatgggttctgccgtgcagcactcagcagccaaaacaccccatgctgtgttaacccccgtggctaacagccaagccaagcaggggtctctgataaattctttcaagccgtcaggacccacagcagcatcctgtcagctgtcctctggggataaagctgtaggtcaagggacagccaagacagagtccgctgcgacctcgactccatctgctgcaggacagctcaacaagcctttctcattcgcctccccagggacctttacttttgggacaatcacaccaaccccatcttctagtttcactgccacaccaggggcaggaccccctactaaagagccaacccagcttgaggcattctcatttggcgggggaggcaaacctttctctgaggccattcctgggaactcccctgccacaggagcaacatcggcacccagcacttctgtaacagctgcctctctggaagactctgctccatccagcagcaaacctgcagctcctcctgaaactactgtgtcctctgcttctagcaaattggaaactccaccgtccaagttaggagagcttctgttcccaagctctctagctggagagacgctggggagcttctcgggcctgcgtgttggccaagctgaggattctactaagccagttagtaaggcctcctccacaaacctagctggagcccagccagctaagccctcaggggttagctttcctaatacttcagtgttagggaagccagtggagcccgctgtgacctcctctgtgagccccgccccagcagcaccagcctcagctctgaatgtgagcactagcagttcctcagcaactgtctttggcagtgtgccccttaccagtgctggacctcctgggctcatcagttttggtggggctgctttggctagtagcaaagctagtttctcatttggaaaccagcagactagtagtagtacagcatcatcagctaccccaacatcgacctcagttgccccttcccttccagcatctttccctactttgtcatttggtggcctcctgagttcaccatcagcttcttccctgcccgtgtcctctggtaagagtacagaggaggcagcaccaccagctgttcctgacaagtcagacagcagtgaagtttcagcaacaacaccctcacttccagtacagccacagtcaacccaggcatctctgcaaacttctgaccctgtcaaaaaagaacctgttcttgtgcagaccacagacagcagccccagcagaccagcatcttctgccagctttgtggcatccacagagtccatgccagtaaccctaggggcccctgacagcaagatagaggcagtgtctcctgcgtccacctttgcagggcctggacaggctgctgtggcaacagctgttctcccaggagcaggctcggcagccactgaagcatcgggtacccctaccacctccactgtctccagcagtagcccaacttctgccacagagacagctgtatttgggactgccacatctggttcctcagtctttacacagccacctgctgccagttctagctcagcgttcagccagctctccagtaacacagccactgcgccctctgccacccctgtgtttgggcaagtggcagccagcataaccagcacagccgctgccacaccacaggccagcagttcagggtttggcagccctgcatttggtgcttcagctcctggagtgttcggacagacagcatttgggcagaccccagcctttgggcaagcaacaagcagccctgccagtggcttctccttcagccagcctgggttcagttccgtgcctgctttcggccagtctgtctcctctacccccgcatccaccagtgcaaatgtctttggagccacctcgagtaccagcagtcctggttccttctcatttggacaggcttctaccaatacaggagggacgctgtttggtcaaaacaaccctcctgcttttggtcagagccctggctttgggcagggaagctctgtgtttggtggcacctcggccactacctctacagcagcaccttcagggtttagcttttgtcaagcctccggttttgggtctagtaatactggttctgtgtttggccaggcagccaacactggtgggtcagtctttggccagcagtcatccacttccagtggtggcgtgtttgggtctggaaatgctacaagagggggcggtttcttcagtggccttggaggaaaacccagccaggatgctgccaacaaaaaccccttcagctcagccggtgggggctttggatctacagctgccccaaatacctctaatctgtttggaaacagtggagctaagacatttggagggtttggcagctcatccttcggggaacagaagcctgccggcacattcagctctggcggtgggagcgtagcatcccaaggttttggattttccactccaaataaaacaggtggcttcggtgctgctccagtgtttggcagccctcctacttttgggggatcccctgggtttggaggggtgccagcattcggttcagccccagcctttacaagccctctgggctcgacgggaggcaaagtgttcggagagggtactgcggctgccagcgcaggcggattcgggttcgggagcagcggcaatactgcatccttcggtaccctcgccagtcagaacgcacccaccttcgggtccttgtcccagcagacctcaggctttgggaccccgagcagtggattcgctgggtttggatcgggcacaggagccttcacctttggatcatctaactcgtctgtccagggcttcggtggctggagaagctgagctgatgtcagcattccctcaagttcctgtgagctcctgtgcgcatccctccacagcaacagactgtcaaaagaactttctcatgaaaacgctcagccaggaagaaacactggagaccaaagctcagcaatgcttaactaactgcctgttccccgctttcaaattttacatcaagtttttcgtctgctattaaagtgtttggtctggttctgcacagaac

SEQ ID NO: 1172 - protein, 1663 aa, Mus musculus
SQQKESDSLSPQEVFLVLHLSLKLHKTWKLQKHPLRIFHLRTLLTLTPSLCPMIHEALLWSPLALHASSLLLLSPGSPHCTPLDPTAPRAAPGSGTSTFSFAPPSKGSLASTPAVAPVATSAAPFTFGFKPTLESTPMSSTPNTGMKPSFPPSASSVKVNLNEKFTAVASSAPVHSSTSTPSVLPFSSSPKPTASGPLSHPTPLPASSSSMPLKSSVSPSPAAGRSTQTAPSSAPSTGQKSPRVNPPVPKSGSSQAKALQPPVTEKQRPQWKDSDPVLAGIGEEIAHFQKELEELKARTAKACLQVGTSEEMKMLRTESDDLHTFLFEIRETTESLHGDISTLKTTLLEGFAGVEEAREQHGRNHDSGYLHLLYKRPLDPKSEAQLQEIRRLHQYVKFAVQDVNDVLDLEWDRHLEQKKRQRRLIVPERETLFNTLANNREIINQQRKRLNQLVDSLQQLRLYNHTAPWSLPSALSTQSNSHSFDSDLECLLKTTIESHTKPSPRVPGKLSPAKQAQLRNFLAKRKTPPVRSTAPASLSRSAFLSQRYYEDLDEGSSASSVAQPLEGEDARPTCTSVAQPLEGEDAQPICKEEEAVVPVPRHAPVVRTPSIQPSLLPQSMPFAKPHLIHSSSPAVMSSAVSTSATKVIPQGADSTMLATKTVKHGAPGPSHTVAAPQAAAAAALRRQMASQAPAMSTLTESTLKTVPQVVNVQELRSNPSPPSAAMGSAVQHSAAKTPHAVLTPVANSQAKQGSLINSFKPSGPTAASCQLSSGDKAVGQGTAKTESAATSTPSAAGQLNKPFSFDGTFTFGTITPTPSSSFTATPGAGPPTKEPTQLEAFSFGGGGKPFSEAIPGNSPATGATSAPSTSVTAASLEDSAPSSSKPAAPPETTVSSASSKLETPPSKLGELLFPSSLAGETLGSFSGLRVGQAEDSTKPVSKASSTNLAGAQPAKPSGVSFPNTSVLGKPVEPAVTSSVSPAPAAPASALNVSTSSSSATVFGSVPLTSAGPPGLISFGGAASSKASFSFGNQQTSSSTASSATPTSTSVAPSLPASFPTLSFGGLLSSPSASSLPVSSGKSTEEAAPPAVPDKSDSSEVSATTPSLPVQPQSTQASLQTSDPVKKEPVLVQTTDSSPSRPASSASFVASTESMPVTLGAPDSKIEAVSPASTFAGPGQAAVATAVLPGAGSAATEASGTPTTSTVSSSSPTSATETAVFGTATSGSSVFTQPPAASSSSAFSQLSSNTATAPSATPVFGQVAASITSTAAATPQASSSGFGSPAFGASAPGVFGQTAFGQTPAFGQATSSPASGFSFSQPGFSSVPAFGQSVSSTPASTSANVFGATSSTSSPGSFSFGQASTNTGGTLFGQNNPPAFGQSPGFGQGSSVFGGTSATTSTAAPSGFSFCQASGFGSSNTGSVFGQAANTGGSVFGQQSSTSSGGVFGSGNATRGGGFFSGLGGKPSQDAANKNPFSSAGGGFGSTAAPNTSNLFGNSGAKTFGGFGSSSFGEQKPAGTFSSGGGSVASQGFGFSTPNKTGGFGAAPVFGSPPTFGGSPGFGGVPAFGSAPAFTSPLGSTGGKVFGEGTAAASAGGFGFGSSGNTASFGTLASQNAPTFGSLSQQTSGFGTPSSGFAGFGSGTGAFTFGSSNSSVQGFGGWRS

SEQ ID NO: 1173 - DNA, 129115 bp, Homo sapiens
tccatttcatcctgcgtctcagattgatgctgctaccggcatttctactcctcttcctctgtcctctctcttttcttctccctttagaatattttgatcatttttttttttctttagaaagaaaatttggccaggcacagtgtctcacgcctgtaatcccagcactttgggaggccaaggcgggcggatcacatgagatcaggagttcgagaccagcctgggcaacatggtgaaaccccatctttactaaaaatgcaaaaattagccgggcatggtggcagatgcctgtaatcccagctactcgggaggctgaggcaggagaattgctttaacccaggaggtggaggttgcagtgagcccagattgcaccattgcactccagcctaggggacaagagcaagacttcgtctcaaaaaaaaaaaaaaaaaatttggcttatcaaataaacacattttcatcattaaaaaaattggggaaacacagcaagacaaaaagacaaaaatgcatcacccacaaccccacctcccagaagtaactgctacaaacatttccgtttctagccttccactctttattctaatcacaaaagctgttttatatcatttttgagcctccttgaaaaaaataactttctattggtcagcccggccagaaaaaataagtgaaataaaacaatggtgagtattttgatttattattgatttttctttctttttttgagacatagtctcattctgttgcccaggctggagtgcagtggcgcaatcttggctcactgcatcctcagcctcccaggttcaagcggttctcctgcctcagcctcccaagtagctgagattacaggcacgcaccaccacgcccggctaattttcgtatttttagtagagacgaggtttcaccatgttggccaggctggactcaaactcctggcctcaagtgatccgcctgcctcgtcgtcccaaagtgctgggattacaggcatgagccatggcgccagctgatttttcttttgaaatatagttaatggctgcattgtaggaatggattctaatttgtttagccgatgcctttgtgtggaccatttggatgccttccaattttaactattattgataatcctgtaaagaacctctttgtacatgagtgcttgttcacctccctggttatttctgtagaggaaatctcaggaaggggacactgggtcaaaggcttttgaagcatcttgccgaactgcccgagaaaggtcctgccaacttcagagtctggcagtgcgtgtgcagccctttccccctttcctggagaaggctgcccagctctctctgaatgcgtggacatcctggcacctttgggcctggccccagtcccgcccgccttgccaggaggagcattggctgcgccacggcccatggcccctaccccagccctctcctgccatccttagatgacccattgttcactggagaacaatccaaaggaaattgcctcagatcttggtgggagctgggcggtcagagacagcaccgcctcgggctggagtgacattctggggcctcccttgtttttcttgaattttgttcttttgttggttttcctgctctgtgggatatttttggcatcctctcccttccagccggggcagagccctaggacagcaggacaggagtggcacgtggggagaagccacctgccactcggcacccagcagagttactttcaatgcctgacttcctgaccctgccacactgggcataactccccaggcagcaggagagtgggcacccagcccaccctaactgcaggaaatagcagagcccacagtcatggtgtgaagaaagtgctctgggccggtgcttcctgcacagagatccctgaatgatcccatccacccgttccaccgttggtgggagcaggggttcagagaggttaagtagtgtgccccagatcccagagccaggaatagcagagctcgattccaatgcaagcccgtctgactctagaagcccaggtcactaaccactagcctatacggcctccaaagagagcagggagggcgtgatgggctcctcctccctagagaaggagtgcagacgccaagtttctaggcgtggggtgcctgagtggagctttcccagcttccctgctaagccccagcagcccatctccacttaacagatctgcttttcccccggcagacctgatgtctttaaagaggatgatggagaagcttggtgtccccaagacccacctggagatgaagaagatgatctcagaggtgacaggaggggtcagtgacactatatcctaccgagactttgtgaacatgatgctggggaaacggtcggctgtcctcaagttgtgagtacctccttcctcccttgggatctctgaaggcaaaatcattctgtgcagagaggcccctggctctgggcaccccagccattccccacctagtaggtaactcattgtgcgacctgctggacaaggtacttacttctcctgatcctgatttccttatctgtcaattgtttgtttgtttttttttcttttgagatggagtcttactctattgcccaggctggagtgcagtggtgtgatcttggctcactgcaacctccgcctcctgggttcaagtgattcttctgcctcagcctccctagtagctgagattacaggcatgcaccactatgcttggctaatttttgtatttttagaagagacggggttttgccatgttggccaggctagtctcaaactcctgacctcaggtaatctgccctcctcagcctcccaaaatgttaggattataggcgtgagccaccacacccggcccaaatggtcatattaatatgtaccctgtaggggaaattagcttgtagcagagtcaggcagaatcagtactcagtaagtggcaactgtgatgatgatgatggtggtgatggtgataatggtgataaatctgttgaaactttccgagccttagttttccttttttttttttttctttttgagatctcgctctgtcacccaggctggagtgcagtgacatgatctcagctcactgcaacctccgcctcctgagctcaagtgattctcctgcctcagcctcccgagtagccaggattacaggtgtgcgccaccacacccaactaatttttgtatttttagtagaaatggggtttcgccatgttggccaggttggtctcaaactcctgacttccaagagatcagaccccctcggcctcccaaagtgctaggattacaggcgtgagccaccatgcctggcagtttccccatttgtaaagcacctccactaaccccacaggcttgtaagcataaaatagagtcaaaaattggccccaaagggaggcagggtttgcatcttgatgctattacttgctaccaaaatgaccctgggcaagataccttaggtctgcgagtctcagtttcttcatctataaaataggggtgataatcatgtcttccgtgatgtcctgagggctagtgaaatgacacttatgaagatttcagccttgtgtggctgatggcaaacacctactacgtggtagcacattgtgggtgctgccccattgaagagcgttacagcattgccctggacagtctcattgtcatttgtcacagctgaaaataacactctgccaggtgccctggctcacgcctttaatcccagcacttcgggaggctgaggccggtggatcacctgaggtcaggagttcgagaccagcctggtcaacatggtgaaaccccgtttctactaaaaatacaaaaattagctgggtgttgtggctcacgcctgtaatcctggctactcgggaggctgaggcaggagaatcacttgagcccaggaggcggaggttgcagtgagcagagatcgtgacattgccctccagcctgggcggcaagaacaaaactctgtctcaaaagaaaaaaaaaaaaaagaaaacagaaaataacacttacttggcttttatgaaataagattcacttttttaaagtacgaatgtaaaatatacctgtctcattttacaaaggagcttgttgaggcccaaggagactgagtacctggcccatgagcccacggtccaatctggccagatcttctagcaccccacttccagggagaaacgccaaggatcagagaggtcaagtgtcttgcttgagccacccggctgggaagtagcagggctggcatttgaatctaggcagttgccctagaggttatacgctgagcccctaccctctactccccagacaccactctcagagcagtgggcaggtttttgaagatctttgcgcagaggcgtggcccggcctggctcagcctcctccaggcagtgtggttaagggaagggtatggcctggaagtcagaagcctggagttgtacccagcctctgccctggaccgcctgtgtggttctgaggagtcatatcaccactttgcgcctccattttctcctctgtaaaatgggactagcagccccttccttggagctgctgtcttgggcttctgcaaggatcccactggagaacagatttaaattctgttgaggaccctgctgacatgaggctgggatgatctttccctggatgagggaaggatcctaatcttgtttttctttctttttttcttttctccatctccaaaccagagtcatgatgtttgaaggaaaagccaacgagagcagccccaagccagttggcccccctccagagagagacattgctagcctgccctgaggaccccgcctggactccccagccttcccaccccatacctccctcccgatcttgctgcccttcttgacacactgtgatctctctctctctcatttgtttggtcattgagggtttgtttgtgttttcatcaatgtctttgtaaagcacaaattatctgccttaaaggggctctgggtcggggaatcctgagccttgggtcccctccctctcttcttccctccttccccgctccctgtgcagaagggctgatatcaaaccaaaaactagagggggcagggccagggcagggaggcttccagcctgtgttcccctcacttggaggaaccagcactctccatcctttcagaaagtctccaagccaagttcaggctcactgacctggctctgacgaggaccccaggccactctgagaagaccttggagtagggacaaggctgcagggcctctttcgggtttccttggacagtgccatggttccagtgctctggtgtcacccaggacacagccactcggggccccgctgccccagctgatccccactcattccacacctcttctcatcctcagtgatgtgaaggtgggaaggaaaggagcttggcattgggagcccttcaagaaggtaccagaaggaaccctccagtcctgctctctggccacacctgtgcaggcagctgagaggcagcgtgcagccctactgtcccttactggggcagcagagggcttcggaggcagaagtgaggcctggggtttggggggaaaggtcagctcagtgctgttccaccttttagggaggatactgaggggaccaggatgggagaatgaggagtaaaatgctcacggcaaagtcagcagcactggtaagccaagactgagaaatacaaggttgcttgtctgaccccaatctgcttgaaacctgactctgcttctctcatttgtcttcctaccctactcacataattcactcattgactcactcattcaccagatatttattgacctgctattataagctttacatcctcccatgttgtcctggcatgtgcagtatacacggtctaactcatctctccccagatctctcagaaccttgagcttgggaattgaactggggtcacctgtgtcctttcttatggactcgcaggattttagaaccctaatgcaccctggagggtagctgggccagacttctcatttcacaggtgaggagactggtgccccacagggattaagtgccttgcccaaggtcaggcttatctccagagggaggtgccctggactggggcccagatgttcagggaccctgcctacacctcatttccagtgtgggctgccttagttagttatgagaacagggaagggctgggaagagacagcctccaaggtcaacacttggagagggtttcacttgctctgaagaccctggtccaggattcgccctctcccatgccttcaagtcagcatcaggcttagggcaaagaccaggcctctgaagctgcctcttgtaattcatgcaggaagatgtcaaagtcagccccatcttggctgatcagggtgttcagccttaaccccacctgtgttctgaagtctcttaccctacctgctcaggactgagacagttattcactgaacatatttattaagcacttgctgtaggccaacagttaagaatccaataatgaaatggacagattcatggaacttagagtccaataggaaagtgagacccagacaatgacaatgagataaatgttaggaagggggaggtatggggtgacttccctgcagtcctgggggcctagatgggcccaagactgggtgagagtcttggcagagcctttgcaacaccttaagtggacaggactgggaggtcttggtggttggagccaacgtgggttccctgcggctccttagtcacctctgatagcagattgagggaggaaaacaggtaaggcatgaggaaatggccaggttgggttaacccactggtttcaaccagttcaggaatgaggttatttggccatgactggctgatcttgagctcaaggatctgcttcaaatgcacacaggcctagttgaagtttaaaccccagcaaaacattcctccctgtaaatggaaaatcctacttctacccccaccctgccctgttttttgttttttttttccccaagatcattagatgtcctcacccctcctcactgcctctcctctctgggacaggctgggacctttgaggaagataaagccttccttgactacccatcatattcagtgtccctgttcctcactcagagaggaaggcagaaccagtcaggcttatttcagtaagttccacagttctacaagactgcaggaattctccttaagggaggagagcaagcaggtgtggccccagcttctggaaatggcagaagagagggttttctcattgaatgggggtgggggctcgtgtgtcctgggaaaccccatcagtcccttcatttcttgagactcaactcctgggaggagagggtctcaagagttgtccctggaaggagggcgggggcagtctgcatctatttcaggttgtggctcttggttctaggactcttacttctctggctaagggctcagcttcttgggacttcaaccatcttctttctgaaagaccaaatctaatgtaaccagtaacgtgaggactgccaagtatggctttgtccctatgactcagaggagggtttgtcgggcaaattcaggtggatgaagtatgtgtgtgcgtgtgcatgggagtgtgcgtggactgggatatcatctctacagcctgcaaataaaccagacaaacttaccaacgtcttgattggtgtattttggggctggttctgggctcagcaaattgcgaactagctaatatagtaagagattaaatgagcatgtcctgtgccttttgtctgagacagctgaaattcacttatcctaaccacctccctgcaagagacaggttctattatgtcatccttgtttcacaactgaaaagtaggcttgaataagcaatgtgctgcaagccaaacagtaaatggcacaatccgacccccctggagccaacccatgaggtccaagttaagaacctctgtcggccgggcgcggtggctcacgcctgtaatcccagcactttgggaggctgaggtgggcggatcacgaggtcaggagatggagaccatcctggctaacacggtgaaaccccgtctctactaaaaatacaaaaaattagccgggcgtggtggcggccgcctgtagtcccagctacttgggaagctgaggcaggagaatgctgtgaacccgggaggcagagcttgcagtgagccgagatcgcgccactgcactccagcatgagtgacagagtgagactccgtctcaaaaaaaaaaaaagaacctctgtcctagagcatttataattcactacagaaatgtattctatgaaggactttaataccatcagtcagccttatccagacgatctcaattctaatcctgtcaccaccactttctgactgagggctattggagaattttctcaacttctctgtgcctcccttacctcatcaattattattatgtatgtgtatgtgtgtgtgtgtttatatatatatgtgtgtgtgtgtatatatatgtgtgtgtgtgtgtatatatatatatatgtatatttttttttttttttttttttttttttctgagacagagtctcactctgtcacccaggctggagtgcagtggcacaatcttagctcactgcaacctccaccttttgtgttcatgcgattctcctgcctcagcctcccgtatagctgggaacacaggcgtccgccaccacacccggctaattgttgtatttttagcagagacggggtttcaccatgttggccaggctggtctcgagctcctgacctcaggtgttccacccacctcggcctcccaaagtactgtggttacaggcgtgagccactgctcccagcctatttttatttacttttttttttttttttttttttgagacggagtctcgctctttcgcccaggccagactgcagtggcgctgtctctgctcactgcaacctccgcctcccgggttcacgccattctcctgcctcagcctcccgagtagctgggactacaggtgcccgccaccgcgcccggctaattttttgtatttttagtagagtcggggtttcaccgtgttagccaggatggtctccatctcctgacctcgtgatccgcccgcctcggcctcgcaaagtgctgggattacaggcgtgagccaccgcgcccggccttttatttactttttgagacagggcctggctctgtcacccaggctggagtgcaatggtgcaatcacagctccctgtagcctcaacctcctgggctcaggcaattctcccacctcagcctcccgagtagctgagactacatacgcatgccatcactgctggctaatttttgtggttttgttttgttttttatagagacggggtctcgccatgttgccgaggctggtctcaaactcctggtctcaagcaatcctcctgtctccgcctcccaagtgctgggattataggcatgagccacccgcgtctcatcaattaaataaataacccctaggacgactaagatgtcttcaagattacatgagatcccacatctgaaggtttttgcaaaggacttggcacaaactcgtgcgactagacatggatatggctcttgctctggaaaggatcaccttgataggagcaaacaaagctggtcttcggtgccctttaatctcccctcccagccttccaccttccacactttaagagtcgtccctgccgaccccccgaccccgtttttctgaacctcccttcctccccttgcatagtccaaagcctctctctaaagcagccccccgaaaacatctgtcaagttccaaacttatctgaatcggaagctaccaatagccaacctacatctaaggggaactgtaagatttcagaagaacaagaagcataggtcgcttaggcgtgggccacccaagaagagagacttaacactaggtaagcccgcgctggctgcgaaggcgggagcggcaccaggaccatccagggcgcaggcgcagggacctcacggccacgccactactcagcccgagctggccaatggggagcggcggccggaagaacgcgcggcttcgctaggttccgcggcttcctctgaccaagcttgacgtcaccaaagcgcgccggaaatgcgaggtcaactgcgcgccgctggcgctgaggggaggaagtttgctgtcgagcggcctgggttccgtgggcaaggccgtgggaggcagcgttggctgcttcgacacactgagggcggcgcgatgggagacgagatggatgccatgattcccgagcgggagatgaaggtcagagactaaccggggcctccctcccttctttagtcctggcgttgccttggagcccagctgaaaggcgaagcgcggtgctggctgtcccgcctcctgcttgaacagtttaccgcgttcacagctctcaccagcgcgtctgccgcgccgctggcgtgatagccccaccgaatgcagtttcccagtcccatcctggtctcgtgcacggctgttgagttaccctagctacttcctggggcggtcacaatagtggcaataactgctgtttattgagtgttgactgtgtgccaggcactgtggtagtcatcgcggcagccctacgaagtagtcgttaacgtagaggagtaagttgaggctcggaaagtaatttccctaaagtcacatttgacgcggggctgaaagccagcatcatttaagacctttgctctcccagtacttctgtaaggtgatacgggcttgcctaacgtagagtcagggaaggtcatccatcctgcagaacctttagttgattggactaggaagactattttgacctcggtatatcagcctaaagtcaggaacctaaagggagggccaagtggtcccagtgatagcaacgtgggagtcccccagggataacttcaggatggtgtgtttaatagttcttatatgggttctgacagaatgaggctacaacagacgggctacatctgttttaaatagtgaaaagaagtaagttgcaggaagattttaggcatctgtgtgaacaataaatcactaaaatgcatttagggcatagtaataccatgtttagaatagtgatttttttttttttttgagacagagtcttgctctgtcacccaagctggagtgcagtggcatgatctcggctccctgcaacctccacctccccggctcaagcgattctcctgcttcaacctccctagtagctggtattacaggcgcctgccaccacgccccactaattttttatatcatttggtagagactgggtttcacgatgttggccaggctggtctcgaactcctgacctaacgtgatccgccctcctctggctcccaaagtgctgggattataggcgtgagctaccgtgctgtcctagaatagtgattattttttgagaatcaccacctgtggtgagccacctaatggggttgtgtcatattcctcagatatgctggggtagaagaaaaaaaggttttattaatagaaccacagacttagaagatggtaatctcgcactccctttggcagcacatataaaattgggatcatgcagagaagactattatggcccctttacatggatgacagacaaattcatgaagtgttccatatcagaaaaaaatgagggccgagtgtggtggctcatgcctgtgagcttgcactttgggaggctgaggtggatggatcacttgaggtccggagttcgagactagcctggccaacataatgaaaccctgtgtctactaaaaatacaaaaattagatggccatggtggcgggtgcctgtaatcccagctacttgggagtctgaagcaggagaatcgcttgaacctgggaggcagaggttgcagtgagccaagatcgctgcactgcactccagcctggacgacagagcgagactccatctcaaaaaagaaaaaaagacaattgagacagaccttggtctcagtaatacatatttttgttgtactgaaattgggtctactgaatataacatgttttaatttctttctttattgaattgatctcgttttgattcttcacaacaggattttcagtttagagcgctaaagaaggtgagaatctttgactcccctgaggaattgcccaaggaacgctcgagtctgcttgctgtgtccaacaaatatggtctggtcttcgctggtggagccagtggcttgcagatttttcctactaaaaatcttcttattcaaaataaacccggagatgatcccaacaaaataggtaagttccctggtttatgttgcaaagtagagagaggagtatggtggcatgctcttgtgtttccttcccaagaagtcattctaatactaaaatgaacactgctgtcagtttgaaggttgactcccaagaagattaatggaagcctttctaggttttttccttggtcctttgtatttctccttacatgagttgttcctctcagctcaacagggaagaacttaaccattatgccatgcttttatttttgctcagttgaacttgggctctggctctctgggtgaagggttttattggcatgggttttcagttggcacaacagtatgatccaaactattggcaaggtgtactatttagagcattgttgcaaaaatattttcaacaagggcagcagccacagttagtttccccagattgtatgaggaagaattccagggatacttaatccatcattatatatctttaagaaagttaagatttatctgtataactaggtattggggtgtatgtgtgtttatgtagatgcaaaaattttttcacatcgaactggatagaggttgtggctttatgcttagaacataccgttttctgctttgtatttttttgttttcatagttgataaagtccaaggcttgctagttcctatgaaattcccaatccatcacctggccttgagctgtgataacctcacactctctgcgtgcatgatgtccagtgaatatggttccattattgctttttttgatgttcgcacattctcaaatgaggtaagctactgttatactgtgatgtcaacatgagaaccctaagcagatttccttgtattgaattacaacttggaagcttcataggttaacccttgaagtttctctctagattaaaatatgggttaaaaaaaaatccttaattatagaatcatagatctttgagacagaagggacttcaagaaattctttcataacgccatctgccctaagttgttatcaggaggcttaggtgacttgcccaaagtcatagatgaatacataatgtcaaaagttcctacattttggatgttcttccattccaagcagtttaagaatgataataatagtgagtgtttatactgactgtgtgtgttagactctgtactaagtgctttatatgccttgtccctcgttcatgcctaccacagccttatgtagtaggtactattatcttcattttataggtagagaaacaggctcagagtttaagtaactgtccaaggtcccaacattattaagaagcagagccaagattttaatctattgtctgctatttattggttattttgcaattgtgcattccccttctgagagtccccctaagcatgttagaataattgattgccattttcaaagttgtgttgaaattgtctatagcaaatagattgatgcataaaacaatctttttttatggttatggagaaaaataaactgatttgagataccttgtgtattcagtaatttccattgaatattaaatgtttctgcatttactatttgttaacttatttcacttttgcatatttgttttaaaaggctaaacagcaaaaacgcccatttgcctatcataagcttttgaaagatgcaggaggcatggtgattgatatgaagtggaaccccactgtcccctccatggtggcagtttgtctggctgatggtagtattgctgtcctgcaagtcacggaaacagtgaaagtatgtgcaactcttccttccacggtagcagtaacctctggtgagtaataaaggctttcacactgtagcatacaatcatggtcatctacttaagaattgatttctagaagtgaaagtggatagctttttgtgttttggttttttttttcatgacgagggaggttaaggatggaaggtattcttttttgagacagtctcactgtgtcgcccaggctggagtacagtggcatcatctcagccactgcaacctccacctcctgggttcaagcaattctcgtgcctcggccacccaaatagctgggattatagacatgcgccaccatgcccagctaatttttgtattttttgtagagacaaggtttcaccatgttggccaggctggtcttgaactcctgacctcaagtgatctgccctcctccaccccgcatatgctaggattacaggtgtgaggcactgtgcccggctgagagtattctttatacccatagttaatgtccttgaagccaaacagcatacataatttaacctgaatgtacttgggatttctggagaaatattttggtacagctggtttagaagtgttttttgggaataattgtttctggatctgtaacggtggtactctgaaagtcatttgtacctttgggcggaaaagcattttaaatattaaatgggagcaggagaatgatttctggttttgtttttttttttttttttttttttttgagacagagtcttgctctgtcgcccaggctggagtgcagtggcgcgatctcagctcactgcaacctccacctgctgggttcaagcaattctcttgcctcagactccagagtagttgggattacaggtgcctgccaccatgcccagctaatttttgtatattttagtagagacggggtttcaccatgttggccaggctggtcttgaacttctgacctcaagtgatccgtccgtctcatcctcccaaagtgctgggattacaggcatgagccactgtgcccggccagtgatttcttggtatttggaaaccttctctgttctccttgtcttatgtaaagactacagagttttctgtattttgcagctttctgggcagtaatctattgaaaaagcatttttagctttcaattcaatagcccagtgataaatcaattggcttatatcgttaaaatgattttacttttttccactttgcctgatagagatgatcctacaatcttccatggactgacagaggaatgagaattgataattagctgtgtgtgatagatcttattggtttgctccattttcttgttttcatttggtaatactgtctttgctcagtgtgctggagccccaaaggaaagcagctggcagtgggaaaacagaatggaactgtggtccagtatcttcctgtaagttcttatcttgaacttcagaatttttcttaagttgcccacttttttgggggtggtttgggagtatctttcttgtttttcctattaaaaagtaatttatactcattgtaacaaatccatcagtgaatgaagagtggaactcttccctttcccatagtccttcttccagaggcacccactatgttgtgttgagtagatagccttccatacttttctggatgttatacaaatagtctatgggtagctgctttttttttgttgttgtttttatgtaaaatgtgatcatacgctatgcgctgttccccacctttttcagtccattccataaaaacagctcaagggaaaagagttagtgaaaaaactatgatgataatgcagaatcactctgggttaaagcacagtatttgtcttttaactgagtctgtctttaaaggtctgtttgtctaactatgggcaccaaagaaaatggatactcttgttgcatgtgcactctgtcatcctccctgtgaatttcttgaaataatgttcacaaatatccttcaatatcaattgagttgcaaggaacccccatatgtctattgagcctggacacgaaggagggattcacaggtggtgctaaggcctttcttgtgccttcctcctcaagactgttctctggcgaggaggggagcagagtggtgaatgtaggtggtataggtttaaggttaaggttatgtttcttatttgttattaccaaaagttacctgaaatttggtacataatcttttaggacactaacctgtaaaaagataatgcaattttttaaattttcttgctttgctgtttgccttaattttttatttatttattattatttttttttgagagatggtcttgctctgttgcccaggctggggtgcaatggtgtgataacgtaatggttcactgcagcctcagcctcctgggctcaggtgatccttccacttcagcctcccgggtagctgagactacaggcacttgccaccatgcacagctaatttttgtattttttgtagagatagggttttgccatgttgcccaggctggtctcaaactcctgggctcaagcagtgtgcccaccttggccttccaaagtgctgggattacagacatgagccacctcgcccagccttattccactattgatgattgtctgcatcagtgctagtggcgttgctgctgcaaatggtgttgcattgactactctcattacctatatctgaacatgttcatgcgttcatgcgtttcttttcttttctttttttttttttttttttttggagaccaagttttgcttttgtcacccaggctggagtgcaatgacgtgatttcagctcaccgcaacctatgcctcctgggttcaagcagttctcctgcctcagcctcccgagtagctgggattacggcacccgccaccacacccagctatgtatttttagtagagacggggtttcgccatgttggccaggctagtctcgaactcctgacctcaggtgatccacctgcctcggcctcccaaagtgttgagattacaggcatgagtcaccacacccagccacgttcatgggtttctgtaggatgaagtcctggaagtagatagcactattctgtttcttcagtctctcccggccaaggagatggaacaggtagcatctaaggaatagattagatttgacagtttgattggtttaggatttgtttcatttgatactttattttcccctccaaatctctttcagactttgcaggaaaaaaaagtcattccttgtcctccgttttatgagtcagatcatcctgtcagaggtaacaactgcttttcttattgggctgacctctaatgacatgttatgtatattacagaaattcaaaatcatgtaatgtacctgctcagtgaggtattggtgtttgctttatgaataatgtcactatttcaaacagctaattaagtcagtgtaaattatggccctctgggtgacatctgtgtttcacgataaatgacatgaaatggatcccgactttttattacaattcttcataatttgccctgattataatccagcagaaaaattaccatttggggatgagtttgggcttcttgggtcattgtacctgtgcattatatttagtcaatgaaatcagggcctttgattttttttttatccatagtggctattccaaacataagctgctttttcttgtatctggttgctgtcatttttatgagctactgattaagatgtgtctttcagttctggatgtgctgtggattggtacctacgtcttcgccatagtgtatgctgctgcagatgggaccctggaaacgtctccagatgtggtgatggctctactaccggtatgcctgtggaagaaatttcattgtttgagaattagagaagtcttctaataaagctggaggctttgatttcaaggggtttttttgtgtttgtgttttttttttttttttttgagacaagatctcactctgtcgcccaggctagagtgcagtgatgcgatctcgcctcactgaagcctggacctcctggactcaagtgatcctcccaccttagccttctgagtagctggtactacaggtgcacaccactatgcctggctaattttttttttttggtagagatggagtttcaccatgttgcccaggctggtcttgaactcctgagctcaagtgatctgcccacctaggcttctcaaagtgctgggattacaggtgtgcgtcaccgcacctggcctgatttcaggttcttttacttactggcagtgattatgcaacttcaggtataaggtttccatgctgcaccatgggccaggggtctaaaattggagtgtccacagcatgttctactgttatgaggttaaaaaaaaaatgattttgcttaagctataaactatgagtcttggttaactcgataaattttagaaaagcaagacagtatcttgatttttaaaattatttcatttgctctcgaatatttaatgccaacagtgtgctaggcactgctttaaagctgagtatatagcagtgatcaaggtgatgggcttgcttttatggttttaagtttgttgttgttgttaatttttatttattttttagagacagaatctcactctgttgcccaggctggcatgtagtggtgcgatcacagctcactacagcctcaaattcttgggcttaagccatcctcctgcctcagcctcccgagtagttgggaccacaggcatgcaccaacacagccagctgtttttaaatttttcgcagaggtagggtcttgctttgttgcccacgctggtctcggactcctggctttaagcagttctcccgcctcatctctcagagcactaggattacaggtttgagccaccacacctggctggtcttacattttaatgggatagtcaatactaaatgtgagatcaaggactgataagagtgatggagaaaataaagccgtgttagggatagatgatgactggtatgtgtttgagattgtgtgtcaagggaggccaatttgatacttgaaaaagatgtcttgtttttaactcttttggatttctaataaggttgagtttttgaaatatgtttatctagatgccttattttaagattagaggttttttctattctaggggataatattaacactagtatttattaactgctacttatgtttcatgtactgggctggaagttttgtatgtatcatttcattttacactttacagtagcctctgaagtaggcttagtaggtctagtatacacatgagaacactaagtatcaggaaggttgaaaaatctgcatgtctcgtgggcagaaagtggcagaacagagtttaaatgcagttcggttgatggccaatgtttgtactccttgtactaagtgctgcctttataccatgtccgtatatctggactttgagtaaatattctcatataactttaaatgatttattatttgagattcttttgctgtgggatctgagaaaaattgcacatgagaattttttttcttgctttgttcattgtagaaaaaagaagaaaagcacccagagatatttgtgaactttatggagccctgttatggcagctgcacggagagacagcatcattactacctcagttacattgaggaatggtgagcagagagtctggacagggcattcctgctctcactggaagatcacacctgagtcaccttgtcccatgttgaaatcttttctgattgattgattgatggattggcagggtctcactccattacccaggctggagtgcagtggcacgattgtagctcacagaagcctggaactcccaggctcaagtgatccttccacctcagcctcccagatgggactacaagcacatgccaccacacctggcttatttttaaataagttttttggtttttgttttttgtttttagagatgggatcttgctatgttgctcagactggcttcccaaagtactgagattacaggtgtgagctaccgcacccagcctgaaatcttttccattacagaggaaaatggaggctgagatgccttgaacatattttcagctgattcttgataatgtctttctattatttctgtttccccaatcttgaattatttatcttaaatacatactaatttcaaaaatctaattttctcaataacccctagtgatgacttacgaaaatattgatattcaaggaatatattaaaagtttcctgagagcagagttgccctttggaatggagattactcaaagcaaagcttccatccctctagctacattattctgcctttggatggcatattgattgtgaactgtgacttgattctgttgtgtctttcctttgtcttcatgtaggtaggcactgagctgattctacagggctttctcacagaaactaaaaagttcagctttacatctagaatcttcccacctttgttcaaccagataaaaaaccttactctctctttgacatgtggaggcagccctcacaggtgttacctgcagacccaggttagcttagaactattgctgtatttgaacgtaatggtctctggttttattctttaagggatttagtgctggcagcatctgcggcttcaacagaagttagtatccttgctcgacaaagtgatcaggtaaatctcttttttgtcacttctgtggtgctttcttttttaaattattattttgagacagtctcgctctgttgtccaggctggagtgcagtggtgcaatttcagcttactgcaacctctgccttccaagttcaagcaattttgtgcctcagcctcccaagtagctgggactgtaggcgcgggccaccacacctggctgatttttatatttttagtagtgactgggtttcgccatgttggccaggctggtcacaaactcctgatggtacttttctgaaaaagattttggagggaattaactatatgtggttaaggtatacatgatctcacatctgttttatcaagtttctgcgtgacagcaaagcttcagtgacagagtgccttggccaaatggcttggctattgcatggagaaacacgggtgtcagacttagcacttccttcgcttctgttcttttaggatccaacccctgtctgtggaaacataccatgcagttaacctccaactggagtatgcctgatgtgtaggcggctttttctgccttgtcctgttttgtcatctttgttttattcctgttgcttgaaacaacttctatacaatttaatgataatccatcctcagttatgaaagaaaaacatgcagatgacactaaattgtgattcaccagaagtactttctgtttgactttgaaaaactgtcagaaggagcaaagcacctttgcatacaagaaccttctttcacgttgtctttcttgcagggacacagtgggcccaggtagtggtggtgcgctatccacttgtagattttgcagaatgactgtagagagggcacaacgaaagaagggaaacttctttttaaaactggcttgaacttaaaaatctttagtgcacccttataaataagaagcaagtgcttctcctccccacatggatactttgtgctccacccatacataggtactttgtgcctcttcaaccattggcatttatctgtcactctctgggtggccaggtggcccattaggagggccatggctctcattgtctaggggtggctgcttttggatgaggctagagttcagccatctgatttgctgctctagaactatcttagattgacctcagtaataatttcttattagtacaagtatttcatatgttcacacattaaaaatgcaattttatttttactttctatcagaataatttatgttcatgtttttgaaaagtaaatagtagagaagggcttataagtgaaaagaatcacccctgccctacctgtttgctttctagaggggactgtttttaatttgtaaacattttcttataatgctgccaccttatccctaaagaaaaatctgctttataactagtaattggttattagttttagaccttactgactgtacggcaaatgatgatctagctcacacatggcccccagtcccctccttcctctcaagagttacagcgttgttttaatttcttatcttggtgaacctttgtaattttaattggtgttttttaccctcatttctggtggtatctttttttttttttttttttttttgaggccaagtctcactttgtcacccagtgcattggcgccatcttggctcactgcaacctccgcctccctggttcaagcgattctcatgcctcagcctcctagtagctgggactgtaggcatgcgccaacacgcctggctaatttttgtattttttagtagagacaggtttttgccttgttggccaggctggtctcaaactcctgacctcaggtgatccgcccgcctcagcctcccaaagtgctgggattacaggcatgagccacagctcccggtctggtgataactcttgatcttccactttgtgagaggagtgtcttagcactcccaccctttcccttggtagccttccagttgttatctgcgtcttctcttttgtaaaattgcattctgtcctacaatgataagtcatctttatcttgtctgtagactgtttttaaaagttgagattgtttttgtttaatatgaacgtgtctgttacctgctccatagctaagtcacatagtgtgatttcattccctctcctgaactgcctgcctgcttgctttcttgcttgctttctctctctctctcttttttcttcttccttccttccttctctttccttctccttccttttccttcctttccctccactcccctctcctcccctccgctctcctcccctcccctcccctccccataacctaggccagagtgcagtggtatgatctcggctcactgcaacctctgctttccgggttcaagtgattatcctgcctcagcctcccaagtagctgggaccacagttgcacaccaacacgcccagctaattttgtatttctggtagagacgggatttcaccatgttgaccaggctggtttcaaactcctgaccccaggtgatccacctgcctcagcctcccaaagtgctgggattacaggcatgaaccactacatccagcctgtttttctttgttggtctttaagcactattcccctgtgattcatgcttcccagtctggtcaacactgaaagttaggcaaaatgttagtgattttaaaaaccaagagtcatttgttggaaggaacagagcctatccaagcacacttaagcaaaaagggagtttactagaaagacttagtagtttctcaaggaatctggggacaggaaagctgaccagcctgaggaactggtaccaagaactgggaagaagaactaaggttatctctgtctctatagacgagtgagcgcagggcatctgagcacagaccagccttacatgcttctctgtgaaagactgcagtagagatcagctggagttcctggccccaatccaaaatgtctaggagcaggtattgactggcttagtgctgctgttggatttgtccctcatggtcagcaatctccctagttgtcatggaaggtacctcagaaaatgttcatgatagtggttatttatttacaaggcagaggcttgatacaccaggaacagatagagagggggttgatttggaaaattaacttcccatttgctggggtacttctggcttttaggccatcttctcagatttcagagcctcctagtcaacacctgagtctaaaccaagtgagtcatctctgttctcctatttgaacaatgttaggaggaaccaatgcaaagctctaaccaacatggctttttcttttttcttcttcttcttctttttttttttttttttttttttagattaattgggaatcttggctactggaggattctagtcgagctgaattgcctgtgacagacaagagtgatgactccttgcccatgggagttgtcgtagactatacaaaccaagtggaaatcaccatcagtaagtgtagcctggtagttagtgcagaaatagtcttctttctagttagggttaatattgaaacaccagttacatgttactgacagagtctactctgctgggcacttgtagcttctggcagcacatttctccctgaagagtgataataggctgcgttgtgacaacactaaactgatttgaatggatgttcgttgatgagaccaaggccaaacactgtatgtatgtgtgggtgcatgtttgcacacttgcacatgtctgggtgtactttagaatctggttgaaatatagaacatcaggattttatggcttggtttctttgtccaatccaattccctggtgacctcccaaagaagcaatacccgaatctggtactgcacacaagtacttggtttgaaggcaaggattagaaaatagagacctcaggcccatggtttccaaatagggcctagatatgtgttttgaatagatcttccctgcagtagcttggctatactgtagtcattgaaatgtaaaagtgccacaaaagaaacagtctttgccatctggtacttaagtttagagaggtgtccccgtcaggcaccattaagttgcttgctccttccctggttaggcaggagtatttgttctgataagctcatttgctctgattctcttgaagccttaactgataaaatacatacttgtcattcagctgtgaatgaggataaagtggtttgactcatctttctgtgtcctactgtccattccaaagagtctagtctcattttcctactaacctaagtacttcttagatattcttctcttggtcaggggaatgccaagcctacctccactgaggtacacaagccactgagacactcataaaaactgagggacctttgggagagtcagagctactgcgggactgatggagcttctaggcagggcccagcagggtggtggcgatctgatagcggcaggaactctctttaaatagctggtgcacgaaaggctgttcagatataaaatcagaacaaactaacttgagctgctattcagatgagtcccttaaaccctcttcatgttgagggcagtctttgccttctgggctcaggcccttaaattcacttggtttttttatttttgttttcttttttaacaggtgatgaaaagactcttcctcctgctccagttctcatgttactttcaacagatggtgtgctttgtccattttatatgattaatcaaaatcctggggttaagtctctcatcaaaacaccagagcgactttcattagaaggagagcgacagcccaagtcaccaggtatgtgcctctgcctgctttatcagtaagggaataccatgggcttgcacaagagtatttccaagaatgaacatggtgtgaagacacatagtgattatctttaccagcctggtctgtcttaggaaggcacacactaatcttttttttaaacatgcatgtacatatttgccttcccctaccctcaagctttattctgcagccattactttacttcggagatgaaggaaggtcaaccagatgatttgcatccagtcgtttaccaacagttttctaagaccctatattatgtgatgtgcatccaaaagacattgtgcttaatcatgggggttggttaaagaaatgattgtatagtcttacagtgaaatgccatgtaccaattataaatgttatatttattgacagggaaggagtgagtggaatacatcaccaaaaaaaaaaaaaccactattctttgtgatcttttctgtatgagaaaaaacatatacatagaaaaacaacttggagatggatttaaagtctaaatggtggttatttctgggtgatgggaacatggagatttttgtttatattttcttgactttttttctcctttttgaaacatttcttaagtaatagatgtttattgaaggaaaatgagagcatgcaaaacaatggccacagtcaacattttggtacctatcctccatgaaaatgaatgcacacatataaatactagtctgtatttaaacaatttttacagtgacatttgtatcacttgtgaaaagaaacttttttttttttttttttttgtggagacagggtcttactctgttgcctaggttggagtgcagtggcatgaccacagctcactgtagccctaatctcccaggctcaggcagtcacctaagcctcccaagtagctggaactacaagcatgcgccaccatatgcagctattttttaaatgttttgtagagatagggtcttactgtgttgctcaggctggtctcaaacacctgggctcatgtgattcttctgcttcagcctcccaaagtgctgggattatacgcatgatacactgtgcatgaccagaaaatataaaacttttaaaaagagcattgtttcatatgttggaatttgactaatatttctctttttgaattctgtgagtatataactgatacaatttttttcttctattatgaccagtttcttacctaagcaaaaatgtatgaccagttggtttgtataaggttagcaataacttaggggtatattctcttcctgcatcccagtgcacagtgagttgtatatcacaaatagagccactcagatacttgggccctaacaactggcagcactaccccaagtgatataccagatggcttgcagagtgttgtatcagggtagtccattattcatagtgtgtgtactctttgtgttgtttttttttcctccttattcagccatgaataagggtaccatgaactacctatacccagctgcctggtgtgtctgtaataagcagagcagcctgtgagattaggagcctctgggatgggacgaggtttgtttctgagcctttgctactagcccattcaatgctggagcacaatcagaggccagttttactgttagcctttcctagagaaactcccctcttccttcacagttggtccagaggttatagttgtgttcagatgtgtagaagagagcccctgcggggagaaagtccgtcccatcagctaagtctagctaaagcctacttcatgggttcagaagacattaatggttccacctgtttctacactgcagttctaaggatgctgtattgatcagaagtagtagtagcatgatggttttccaataatcagttctgttttcagtggaaaaaatgcttttgatttatttagggtctggtatatatttttcatgtcagtttacctaatatgcatgaaagtgttttaacatctatgtatgtctttacagaagttagttgtagctggttccatatctattgtataaagaagtattaacagaataggtttgcttgcattattatactttcatcaatgtgacagtttacttggatttttgttttcagaaagtggtattttcatacttgtatctaagtattacgttgcattagacaaagtgtcttccatgaagataaactgccatcttagctaatttggaacaaccaagtcctattaatataaatagaaaatattgacacaaagaattcctttcttatttagttggttatttaatttaaagattaatatttttaccttatggaaagtttggaaaatagaaaaaaaaattattcatttttgagacaggggtctcactctgttgtgcaggctggagtgtagtggcaggatcttggctcactgcagcctctgtctcccaagtccaagcgatcctcccacctcagcctcccaagtagctgggactacaggcacaagccatcacacctggctgatttttgtattttttttgtagcaacagggtctcactttgttccccaggctggtctcaaactcctggactcaaagggtcctcctgctttgccctcccaaagctctgggattacaggcatgagccactgcgcccagccttccattgacttttttttttctttttaaccatttggattgcattaaatatctttttcattttttgcattatgtttgtaagctttattcttagaagagaaattactgggtctgttttttacagttttttatacaatgccaaaatgttttcttaaaaaaaatactagttacctaccagtgataaaaagtttcaggtttgttttacccatccaaacataaggggttagacatatttaaattcttataatttagaggacaaattaaaaatgtaccttgtttatatttctttgattagagagattgaatgtgttttctttatgtgagttagtttccctgtttattagtcctgaaattttaaaatctcaatttgtatgagctttttaaaaaatagaaaacatcttatttgtcatttgctatggatctttttttttagttcattaccatttagttattgtacctgagtagctattttttacacaaatcttaaccttctccctttgcgattgttttttttttggtcacttctaaatttatcaaggtgttagattctgagacctaacatatctatcaatttgcctcctttgttttgagatacctgtatttatgtgactttctatgtgtatttatctggaattacttttagtgaaataaggtggaggtctgaattaaaactttttcctggttgttaatgaaatgttgcagtgactgaactgttttgtgtgccatagtagcactgagaagtccatgaagtccaattattctaatgtctttccttagttttccttcagtttcatttatctcatgagacctgaaaactccaacatgaactgtgtacccatgtgttctttttgcttcttaaactagtaacatttctggctttattctaccacaaattctttttcacttgctttctattatgtgaacctccactgttacagtgttaacattttccttcctttttttgtcactgcaggaagtactcccactaccccaacctcctctcaagccccacagaaactggatgcttctgcagctgcagcccctgcctctctgccaccttcatcacctgctgctcccattgccactttttctttgcttcctgctggtggagcccccactgtgttctcctttggttcttcatctttgaagtcatctgctacggtcactggggagcccccttcatattccagtggctccgacagctccaaagcagccccaggccctggcccatcaaccttctcttttgttcccccttctaaagcctccctagcccccacccctgcagcgtctcctgtggctccatcagctgcttcattctcctttggatcatctggttttaagcctaccctggaaagcacaccagtgccaagtgtgtctgctccaaatatagcaatgaagtcctccttcccaccctcaacctctgctgtcaaagtcaaccttagtgaaaagtaagtcacttctaaagtttgattcttctgtgagttgggtagaaatattggatgttatttactaaaagtagagtcactctgagaggagttaactgagtagaatttttttacccagagtgatacttgcaaatggcaaaaattcaaccaacataaaatactggcatttcatcagtgggtagagtccagaagggtctcttagctagcattttatttttttgactatgggatttatattcaggtatttgttttgcttttttacgttacaaatgtaggaaatattccttattttaaaaaaagaagcaatccagagtatgcatcctggaagggaaatgaatcccttgtagtcttttttcctccctgtgtctacccttaactctctctgaactgctgtctacacagccacaaagtcatcttgtgacactgtaaattgttaggtgattcttctgcttgacagtccctatgaagccccgtggctgctcactgctaattcttaggttggtatccagtttcctccagatctgggtcgggcagctcactcatttcttatttatttacttctttatcttgttcttttcttcccactagaatgtaagcttttggagggaagcaatcccttatatcttgtaacccctcccaagataaccatgagttcccaagataaccatcgagtataagtactaccagctttttccctacttgcctgtactatctgttgttgctatggtggtgctgctgccaccacagttactgttaatactgaattggcacacatccacttcatgctaagggttgcatagtgttccattttgttgactgcaccacagtttatctgaccagtcatctaatgctggagtttagattgtctacagacttttgctctttaggtggaaccgactttacatttcctttaggccataagtatcccaaagacagttccctgcattcctcttcctttttcactccccagagaaggtgctcactctcaaaacgagttctcagtaatttccttggtaagagaaagtactaactctcctaagcataattgtgtcccacctcctgtttaaaactcagctggaaacaatagtatttcatatcatgataaacttggtatttcatattgtgataaacttagttttgatatttcccctgaataattaattcctaaataagcagacgaaaagataaatgtttccttgcagctttcaccttttataagaaatagctaaacatttttgtttcctgaaggcaaaaagtatgttatctttgtaagttaacataaaagataataagttatcttttgatgacattgctcatgctagtgtaaaagaatcttctagcaggctcttctgaggccttcaggctgccatttttcaggtttactgctgcagctacctctactcctgttagtagctcccagagcgcacccccgatgtcgccattctcttctgcctccaagccagctgcttctggaccactcagccaccccacacctctctcagcaccacctagttccgtgccattgaagtcctcagtcttgccctcaccatcaggtatgattttaagcagacaactttagacctcagccctgccttctcagattaacggttttaagtgttaagagtcgtagctaacatagttggacaaggttattttttcttgcttcctgtatcatacattaatgattaatgtgctgtgattttcatactctgaattgggagatttgctcttgcttaaatgctgccactcttctctctgacacttcttatggagctaagtgtatttaatgagtcaaaaatgccttgctcttgggcatttattttcatatggagcctgccctccatgaagagcagttacataacagttctttaagaagcacaggcacaagagttgtttggcggggtgcggtggctcacgcctataaacccagcactttgggaggccaaggcaggtggatcaccggaggttaggagttcgagaccagcctggccaacatggcaaaaccccatctctactaaaaatacaaaaattagccaggtgtggtggtgggtgcctgtaatcccagctactcaggaggctgaggcgggagaatcacttgaacctaggaggcagagattgcagggagtcgagatcacgccactgctctccagcctggcgacagagcgagactctgtctcaaaaaaaaaaaaaagtacagaggagagagtacctgcagtgattatattcatattttcacagtcagtcatactgtaaacaggaagttttgttttgttttttgagaccctctcactctctcacccaagcacatcactgcagcctctacctcctgggctcaagcgatcttcccaccttagcctcctgagtagctgggactacaggcatgtaccaccaccgtcggctaatttttaaatttttttgtagagacaaagtcttgccatgttgctcaggctggtctcaaactcctgggctcaagcaatcctcctgcctcagcctcccaaaaggctaggattacaggtttgagccaccatacctggctcctaaaattttaatatatttttttcattatcttagaacagaggctagcacaactggtggtcatcactctttaaaataaatcatgaaagtgggccaggggcaatgtgtaacttaatttcttagatttggagaaaggacatttgtgataggagaaataaaggtaataaatgccatctattttaactgacttctttttcaagcaggacgatctgctcagggcagttcaagcccagtgccctcaatggtacagaaatcacccaggataacccctccagcggcaaagccaggctctccccaggtatgtttaaattcagcttgcaatgtttgtgtttattaatttactgccccaagcatacctatgaataaaatgagttttcatgttttataattcagaccttggacatagtaattgggactatgtgatagtaaataccaaagtgcgaggtttgaatacttgtatactcgtaaaagccatttagctattttaattttttattcatgtataatacaaatagaaaaaagtacacatgatacatgtacagctcagtgaattgtcaacaactgaacataccttggtaactagcatccagatcaagaaacagaattttacgagaacctggctgggcacagtgggtcatgcctgtaatcccagcactttgggaggccaaggcgggcggatcacctgaggccagtagttcgagactagcctggtcgacatggtgaaaccccgtctctactaaaaacgcaaaaattagccgggcgtggtggcacgtacttgtagtcccagctcctgaggaggctgaggcatgagaatcacttgaacccgggaggcggaggccagaaccccagagttctttttcacctgtccccttctagtcactactcttgccaaagagtagctgatttgatttccaacagcatagatgaggttagcctgcctgtacctcctatcaagtggatttgtacagtatgtattcttgtatctggctgctttgttcaacattatgtttgtgagatttatccatgtcgttgtatggaatttattgtgtgattatattacaactatttgttccactctgatgggcgcttgagtagtttccaggtttaagccattgtatgtagcactgctatgaccgttccagttgacatcttcaatgaacacatatgcaagtttctcttgggtgtatccctatgagtgagattgctgggtcatagaatctgcatgtattcctcattagtagattcccaccaagagtgtatgagacttctggctgctccacatacttgccactcttggtatttttcatcttttgttgtatggttttgtggttttaatttgtatttctctaatgattagcaaaattaagctttttaaaagatgattattggccatttgaatattttcttttatgttgtgtctgttcatgtctttattctgtttttctgttggattgtctggctttttccttctgatttttaagagtgagttccttgaatacacacacacacgcacacacatacagtgcaaatatgttctcactgtgaattgtctattcattgtcttttttgtttctttgatgaatacacattcttcattttaatataattaagtatatcagttttttcttttatgattaatgcttttcatgttttagaaataattttctatttcaaggtcaaaaagatgtttttctaaaagctttattattttatctttcatatttagatttgtagtccatcatctcagtttatttttatggtataatgtaaagagaattgtatgtcagtttcccacgtgattacttgagtgccctgagaataagcgttatgtcttttcctttctgtgtccccctaaccaacccttgtaccctaacacacacctgtactaggtacatagtaagtgcccaggtcacagttcacggtgtggcatgatgcatgacatacagtgtttgtcaaataaatgtttgctgttaatgaatgctgatgcagtctaagacctctctagtgttaatcgttgtaagtatcaaatagtctaaagggcatttcaaattatagtatctttaaagcagaactcttgatttctgtctcccctagaggctagtccttttccaatgggtaagtagcactaacaaaccagatgtttgcacaagccccaagccccgaagcatcctagatccctctctttaacagtacctgtccccagtccaggctggcgggaggtcttgtcagctccaccctctgctgtgtcacatgtcataagcccacagctctgtccccctgctagcatcctgtgtcaagctgttgcacctctcaccttgttaacctctcgactactctctctgctatccctgctctacatagcagcaagagggatcttttaaatcataaaggagatttaaactcttgtaaaacaccagtagtagctttccaacacgtttagaatagaacccaaactccttggtgtgaccttatatgacctaccccggcctgccttcctgactctacccctgccctctacaacgcctcccctgacttcacagagcccacatttactttttttctttgctaaggtttctcctgccttgagacctctgcacttgcctttcttggtgcctggcaggtgcttcctgaagatctcatagcttgctttctgcttgcagcctccgttcagatggcagcccgcagtgagggctttcttggccatctcatctgaagtagtgcccttttttattctctttatgtttccctgtttgttctccaactgaaattatcagatgtgtttatattttattattcaacatgtcccagtaggaggtaagttccataagagttgggccctcatctacttgttcacctctacctgcactgtctagaacatgccttacacaaagtagagaccctataaataaggattcgttacaatgagtgaagaaataatgactgtgttacaggagcgccactccctgtaataggctctgatataattgcttgtagaagctatgacttgcagtttttaaaccttttccttccatttcaggcaaagtcacttcagcctgctgttgcagaaaagcagggacatcagtggaaagattcagatcctgtaatggctggaattggggaggaggtaaatttgtttcctgagggtgtttttctgaaagtagctgacagacttggatgggtcagagtgccaacccctgtatgactagttagttcattctagcgctgaagcatggcccatcccagcagtctgagcagttagtaagcacgatagcagtgacattactgtttgtccttcagactgagtagttcctcacttgtggcttctacagattgcacactttcagaaggagttggaagagttaaaagcccgaacttccaaagcctgtttccaagtgggcacttctgaggagatgaagatgctgcgaacagaatcagatgacttgcatacctttcttttggagattaaagagaccacagaggtttgtgtttatggatacttttcctgagttgaattgcatttaacaatttttttctcctagtactccatggggttatgtactttatttcttcaaggaccaccagtgttgttgtttttttaacgtggctgagtagcttgcctagaatccctgagttcaaatcctaccttcagcacttaataaattatgtgactttgggcaagttaacctcgttactctatttttcagttttctcatcataagatggactaagtttctatccctttgatgcatactgtgcactccataaaatttattataattgttaatttaatttaggtttatttgaaattttactatctcaaatagtgttcgatttttaaaaaaggatattttaggacatatgcagtatgaaaatattaaatgctgggtgttaatagtgttaattattgtaaccattattactacttactgtgtgccaggcactgtgccaaacgcatcacttgtattatctcactgaatcctcacaactttgctgtgtcatacatactgttaccctattttgcaagtcaggaaactgaggcttaggcaaatttgtcaaaagtcacccacttagcaagtggtagtgccagaattctgcttcagactctctgattccagagttcgggtcttaaatagtgtgtttggaaagaggcaagttctttagagtgttagcagtaattatcttcacatagtagtgttagagctactgtctttgtattttctgcattttcaatcattagaatgtattttttcaatggggatgaaaaataaatataaaaaaagaacattagtgtcgttctaaacagttaaattctttttttacctgagttaaatatgttcagatgttcattctgttcagtgagcgtttgagaaacaccaccttccttgatccaaacagaaagatttggacgtaacaactttttgtaccaacacattattgtactttttctagtcgcttcatggagatataagtagcctgaaaacaactttacttgagggctttgctggtgttgaggaagccagagaacaaaatgaaagaaatcgtgactctggttatctgcatttgctttataaaagaccactggatcccaagagtgaagctcagcttcaggtaggagatctatgtaaatctgtttaaaagatttaaaaacaagctcatgtaacaattgctacctctttttgcatatagatttggatgatggctctttttgaagttgttgattttctgcttataatttaccacatttcccgtaaacttccttaactgtggcaaacagtacacttcatgtaattatgtaatttttttcacttaaaacatagattttttttaaaatactttttttcttgagacagggtcttctcactctgttgcccaggctagtgtgcaatggtgtgatcccagctcactgcagcctttcttcctgggcttacgtgatcctcctgcctcagcctcctgagtagccaggaccacaggcatgtgccaccacacttggctaatttttaatattttatttggagagataaggtgttactatgctgcccagcccagctggtcttgaactcctggggtcaagcagtcctcctgccttggcctcccaaagtgctggaattacacgcgtgactggccaaaattttttattaaaccttaagcttaatagagaatactctgttgaaacatgtaagttgaattataaataaataataattataaataaataataaaaataaataataattattaaagtggcaactatttcttgagtgccatttaatctgctaggtgtttcttatgcattatttctagccttcaaagccagctgctctgcaaggtaagagttactggtccctgtagcccattatacaggtaactggaaattaaatttcataggctaagtagcttgtccaaagtcatgttggctaggaaacggggaaccagaattgaaacctccatttgcctgagctcttttctgtatgctacacttaacttttctcttgaaaaaaaatttttttttttttgagactgagtctcgcactgtcgcctgggctgaagtggcaccatcacagctcactgcagcctcaacctctgggctcaagtgatcctcccacctcagcctcccacatagttgggagtacaggtgtgtgccaccacacccagctgatttttaaattttttgtagagatggggtctcactacattatccaggctggtctcgaactcctgagctcaagtcaccctcctgtctttgtaatcccaaaattctggggttacaggtgtgagccactattcttaattattcttaatctctgcttttgctaatcggattttgctttccatctttcagtgtacaccgaatcattgtgtcactggccttagtgtgggggtcctcttctgctatctcacatttgtctggaattccagcgggaagcgttcactggcatctctggtcttcctcatgacatctgtggggtttgcaggtgtgatgaatcattcttgcctcagagaatttgaggcctcaaactttattgttccccagtgtttctgtcccacacctggtcaacttactgaaaattaaaaaaaaaaaagaaaaatggttccttcttcaagatagattgcagagcccttgctgtgatctgcagccctctggtattcctgatgcgtcctctttccactgtggatattacctctcagcaagagagtgctgcctgcctactgctcatcaaattacaggcatccgctctgcatccgagctacatgttgttcctatgtgcctttccacctctttctctattgacaaactaagaggaaagcatacagctttagggagacacttattcaggagggaataattttcttttttcatggtgctaagtagataatactagttagcatgtattgagtgtttactatggacaatgcacagatgatgaaaccaagataactgaaactgcccaggttttaccactaataaaccttgaaaccttgaacctgggcagtctgactcaagagcctgtgctcgtactcaagagtctggtttacagttcatgcaggtttacaattcactcgggtttgcaattcctgcagttgggtaagtgacagagagaaagacgaacatgtaaatgtagtgtgggatatgttgctatgggaccacaggtgagggagcagccgagccagagaaaagaagtatttgtgataggctttaaaagaagaattgtttttggctggtgggcacaattgggagggcattccaaagaaacagcagcagctaacgcagaggtgtggttgtatctgaagtgatcaaaggaaagagcctcggtgagttgaaagttacatttgctactaaggttacttctacttctcttgaatcatcttggctcttttaaaattacattttctctttttcagataggacatagacccttatccacaaaataatttttttttaatttttaaaaatttcaatagtttttgggggacaagtggtgtttggttacatggttaagttctttagtggtgatttctgagattttggtgcacccatcatccaagcagtgtacactgtaccccaatgtgtagtattttagcccttaccgccctctctcctttccccccaagtctccagagtccattgtatcattctgtctatctatctgtctgtctgtctgtctatctatctatttatttattcattcagagacagtctcactctgtcacccaggctggagtgcagtggcgtgatcttggctcactgcatcctctttcaccgtgttggccaggctggtcttgaactcctgacttcaagtgatctgcccgtcttggtctcccaaagtgctaggattacaggcgtgagccaccgcgcctgttccgttgtatcattcttatccctttgcatcctcatagtttagctcctgctcataaatgagaacaaatggtgtttggttttcaattcctgagttacttcacttagaataatggtctccagctccatctaggttgctgcaaatgccattatttcattcctttttatggctgagtagtagtagttgtgtgtgtgtgtgtgtgcgcacgcgcacgctcgcgtgtgtgtcacattttctttatccactcgttgattgatgggcatttgggctcgttccatatttttgcaattgtgaattgtgctgctgtaaacatgcgtgtgcaagtgtctttttcatgtaatgacttcttttcctctgggtagatacacagtagtaggattgctggatcaaatggtaggtacttttagttctttaagaaatctccatattgttttctgtagtggttgtactagtttacattcccaacagcagtgtaaaagtgttcccttttcaccacatccacaccaacatctattattttttgatttttaaattacggccattcttgcagaagtaagacggtattgcattgtggttttgatttgcatttgcctgataattagtgatgttaagcatttttttggatgtttgtcaaccatttgtatatcttttaagaattgtctgttcatgtccttagcccactttttgatgggattgtttgttttgttcttgctgatatgtttgagttccttatagattctggatattagtccattgtcgaatgcatagtttgtgaaaattttctcccactctgtgagttgtctgtttactctgctgattatttcttttgctgtgcagaagcttaattaagtcccatctatttacctttttgttgcattcgcttttggattcttggtcatgaactccttgcctaagtcaatgtctgtaagagtttttctgatgttatcttctagaatttttatggtttcaagtcttagatttaagtcttcgatccatcttgagttgatttttgtataaggtgagagatgaggatccagtttcattcttttacatgtggcttgccaattatcccagcactatttgttgaatagggtgtccttcccccactttatgttttttgtttgctttgttgaagatcagttggctctaataatttggctttatttctgggttctctattcttttccattggtctgtctgcctatttttgtacctgtaccatggtgttttggtgactataggcttgtagtatagtttgaagtcagataacgtgatacctccagatttgttctttttgcttattcttgctttgactatgtgggctctttttagttttatatgaattttaggattgttttttctagttctgtgaagaatgatgatggtattttgatgagaattgcattgaatttgtaaattgtttttgacagcatggtcattttcacaatattgattctacccatccatgagcatgggatgtatttctgtcttttttttttttttttttttgagacggagtcttgctctgtcacccaggctggagtacagtggcacgatctcggctcactgcaagctccacctcccgggttcacgccatcctcctgcctcagcctcctgagtagctggaactacaggcgcctgccaccacgcccggctaattttttgtattttcagtagagacggggtttcactgtgttagccaggatggtctcgatctcctgacctcatgatccacccgcctaggcctcccaaagtgctgggattacaagcatgagccactgcgcccggctgagcatgggatgtatttctatttgtttgtgtcgtttccatttgtgtcgtctatgatttctttcagcagtgttttgtagttttccttgtagaggtcttttgcctccttggttaggtatattcctaagtttttttttttttgttctttttttttttgcagctattataaaaggggttgttgtttatttgattctcagcttggtcgctgttggtgtatagcagtgctactgatttgtgtacattgattttgtatcctgaaagtttactgaattcgtttatcagatctaggacctttttggatgagtctttagggttttttaggtacatgatcataacatcggcaaacagcgacagtttgactttctctttatcagtttggacgcgctttattttttctcttgtctgtgccagctacacaaataattttgaaaatacatttaaacataataagatctctctacagatgtaaactgcttttcctagtgtatagcacattatctccatttgtagacatacttaattgaatgcctcagttttattttatttttttttaggagacagagttttgctatgtagcccaggagtgcaaaggctattcacaggcatgattatggtgcacaaaagcctcgaattcctgggcccaggtgatcctcctaactcatcctcctgagtagctgggtctacaagtgtacgctaccacgtttagctctgtttttttttttgttttgttttgttttttaattttggacacggtctttctctgttgcttgggccagagtgtgtggtgcggtggcacgatcctagctcactgcagcctcgaactcgggctcaagtgatccttctgcttcagcctcctaagtagctaggactacaggcacacgccaccatgtctggctaatttttaaaatttttgtagagatggggccttgctgtgttgcccaagcaggtctcgaacacctgggccctagcactcctactgacttggcctcccaaagtgtgagattacaggtgtgagccactgtgtctggcgtttttttttttttttttttttttgagagagagtctcactctgttgcccaggctggagtgcagtggtgcgatctcagctcactgcaacctcagcctcctgggttcatgtagttctcctgcctcagccacctgagtagctggaattacaggcgtgcaccaccactcccagctaatttttgttttttgttttttgtgttttgttttggagacagggtctcactctttcacccaggttggagtgcagtggcatgatctcagctcactgcgacttccacctcccaggttcaagagattctcctgcctcagcctctggagtagctgggattacaggcgcgcgccaccacacccgggtaattcttgtatttttagtagagatggggtttcaccgtgttgaccaggctggtttcaaactcctggcctcaagtgatccacctgctttggcctcccaaagtactgggattacaggcatgagccactgcacccagctctaatttttgtatttttagtagagatggggtttcaccatgttggccaggctggtctcgagctcctgacctcgagtaatacacccgtcctggcctcccaaagtgctgggattacatgcatgagccaccatgcccggcctgattttttgtttagagacagtgtcttgctctgttgcccaggccggagtgcagtggcgtgatctcagctcactgcagcctccgcctcctgtgttcaagtgattcttgtgcctcagcctcccaagtacctgggattataggcatgcatcaccctgcccagctaatttttgtatttttagtcaaggcgggatttcaccatgttagccaggctggtctggaagtcctggcctcaggtgatctgcccaccttggcttcccaaagtgctgagattacaggtgtgagccacagcgcccagccacctggcctgtttttaatttttgagaatcaagttgcatagccatgaaggttaacagtcgcccaaaatttaaataaaattattgcaggcctataataagttaaatagctaaaattttaaataatgacagattcagtttttagtgctgatagtgttctttgattttgcaaacaaatgagtatttctcaaatgggaagatgacttatatgttctatgctgtgaatagataggtttagaattactttcagcaccgttttgtctccattacagttaattttatgggtgggagagcaaaatctaaatggatgcactgtctgagtaccagaatggaatggaaaattcccagaccatggaactgagaaatgagaattaagcaagaacatttgttccctgggggcctaggcagccatacccattctgtttcccttttcattgtaccacctctctgccacctctgcctcctgggttcaagtgattcccctgcctcagcctcctgagtagctgggattacaggcacctgccaccctgcctggctaatttttgtgtttttagtagagacggggttttaccatgttggccaggctgatcttgagctcctgacctcaagtgatctgcttgcctcagcctcccaaagtgaggagccaccactcctggccaattttgtttttcattttaattataaagtttttttatgtaacttttttatttgtatacattattagagacagagtcttgctgtgttgcccaggctgatctttaactcctggcttcaagcagtcctcctgccttggcctcccagggtgttgggattataggcctgagccactacacccggcctcattttaattatatagttttaaaaatcgtattaaaacctattctgttttccttgttcattatggttcttaatatagaagtattttagaattcttttgactgttttgatacatcttcccccaaactatcagaaaaacaagttatttgccttttaatttttttcttataggaaattcggcgccttcatcagtatgtgaaatttgctgtccaagatgtgaatgatgttctagacttggagtgggatcagcatctggaacaaaagaaaaaacaaaggtgaatgagatctctcatctgcaatgtgttggaatagatattgctattgccattttaaaaaggttatttaggaacatatgaaaatcccaggccgggtgcggtggctcacgcctgtaatcccagcactttggcaggccgaggcgagtggatcacctgagatcgggagttcgagaccagcctgaccaacatggagaaaccctgtctctaccaaaaacacaaaattagccgggcatggtggcacatgcctataatcccagctactatggaggctgaggcaggagaatcgcttgaacccaggaggcggaggttgcagtgagctgagatcgtgccactgccctccagcctgggcaacaagagcgaaattcccatctcaaaaaaaaaaaaacaagaaagagaaaatctctacaaaacgttcattctttttaacagtcattctacttgaaatatttttctatagaaacaacaaatgatactcagtaatttacataaaatcatttatattgcagtataatttatgatagtgaaaaattggattcagcctaattatctaaaggtacaggagtggctaaataaatatggtcgctttttttcttaactacagaataccctgtaaccattgactagcatgttctccaataaattatttaatatattgaatacatattctatgttctacaaaatgtatgaatatataactatttcgctataattattagatgtaatataaaaatttaataagtaaaaagacaaaagcatattggctaataagaatgtggaggtacaaaagtaaatagatgtaacaaaatattcgtagttatatctgcaaaacgggattaaggagaattttccgtaatactcttctgtatatttcaaattttcttttttagaaaacatttgtaattagtgtggataattaaaaagatgagagaaatgatggcaaagtaatgggaaaaccttttagcatagttttttatccctagatatttggttttaagccacatattttccacaaggagtagaatgtcatgcaccatgagagcatgaagtgcccattagaaatttgaaaaatgaatcagccatgaaatgttagatttctgaaacacctacacttgattaatgattagctagccctgtatgaaaacaaaccaagaaatggtctatttgatgtacttttcagtgggacaacctgggtgtgatatcagggacaggactataatatgcttataatttagtaagcacaattcaataaattacattgtgttatgtggagaaaggctaaaaatcccaactggaggaccctcagcttgcagcatagataggtatagggagatagaagtgagaagctctcctccgccactatctaaggggagaattctgtggcctgtggactggagcacttgtctccatgggcagtggggccccattagagaactagctcacacacctggttctgattcatgtttaaccatatggtttgctttcccacaagggaaacaatggtctaaccttacagtgggtacattctgctctgctcaatggttgtatttctttttggtaattaacaagttagccttgtaagaaagtgcatgatgcttaaagagaagccaagcttttttttcctttgtaacaattctgtggatttactacttatgcttttctgagttctctttctgcagagttcaaattcttaaatctgtacaattttctattttgatagcacttctctgtttcagggccatccctgaatattaccttgaaccctattgaaatgccttttttttttttttttgagactaagtctcgctgtgtcacccatattggagtgcagtggcgcgatctcggctcactgcaacctccgcctccggggttcaggcgattctcctgcctcagcctccttgagtagctgggattacaggtgcgtgccaccacacctggctaatttttgtatttttagtagagatggggtttcaccatgttggttaggctggtctccaactcctgacctcgtgatccacccacctcgccctcccagagtgctgggattacaggcgtgagccaccgcgcctggcctgaaatgccttttaaaaattatatgttgaactaccttgttaccagaggcagtcattcaagtcagccctgaactcaaagaggtaatgggaaaaagggaaataaatccagaggtttctgtttagcaagcatttttcattccatgatttgtgttgaggcaaaatatacatagagtcacttgttgcttaacgtgcgttctgagaatttcattgttaggcgattttgtcattatatgatcatcatagaatgtgcttacactatgtgtacttattacctagatgacatcacctattacacacctaggcgcttatggtgtatagcctgttgctcctagaccacagtaccatacagcaagcttgtccaacccacggcctgcaggcttcatgtggcccaggacagctttgaatgcaatccaacacaaattcgtaaactttcttaaaacattctgagatttttttgattttttttttaagcttatcagccagcattagtatattttatgtgtggcccaagacaattcttcctccagtgtggcccagggaagcaaaagattagacacccctgctgtacagcatggttttgtactgactactatagacaattgtaacacaaatcactaggcaataggaattcagctctactgtaatcttataggatcatcgttgtatatgcagtccatcattgaccaaaatgtcgttatgtggcacatgactgtattgacataccatagcaaagaaaatttggtttataactgatgtgggattattccttatgtttttatatgtatgatttttcctatcccctctgcaaattaatgcagtcagaaaaaaatttcaaagctacttaaagatttctactgaaaagcggaagcaaatagacctgtcgccctctacagtcagacctacttcccagaggcagctactgttgtctctgtcttgttttagttcttttgggcaggttaccttcctgatgctaaatcttatgctgtccccctatttcttgacaatagtctgaagaattaactgactcccatagacttccagtgaaccttttttttttaattgaatataatttacattcagaaaaacagataaattctaagtagaaagctgactggctttttcctggttcctgactcacacctcactcctgcccttttcttcccagggcctctctcaggtttcacctaatgtatgctgtcctttgctacaggactggcctgcctgtttccagctgttttctccacattccattttatcttcattaggctttcatctcctttttattttctagtaatttcttaatggttcttgtccagtgctggttctccattttatcattttcactgttaccattgtagtcttgtttgtttttttactgggagattcctttacttgaaccattcatgtttaattcttttctcattgttgtcaacaggcacctgcttgtgccagagcgagagacactgtttaacaccctagccaacaatcgggaaatcatcaaccaacagaggaagaggctgaatcacctggtggatagtcttcagcagctccgcctttacaaacagacttccctgtggagcctgtcctcggctgttccttcccagagcagcattcacaggtgtggagaggacttgcactcaataaatatgggtgaatgaatgcatgaacatttagggagtcttagagtggttcagatatgggtttgcaagtgactctgtgtctctcacctgtgtaatcctggtcagggtcccacccactctgatcctttgtttctttgcctaaaaaatgaggatgacaatacctgcttcgtgggattgttggagagttaaattaagtctgtaaaatattacactgatgaaatgggtgctgaatatatcacagcaagtgatacaccatagtaacagtgtcatggtttgattgaaaatcagctgataggattaagttgactgacttgtttctgaagcccagatttgccattctgcttgaatggggggactttcagaccctggcagattgacagtttgccttgagtttaccaaaatggttttgtgtttatgcttttaggccaaatgtataaattttaattactttttctactgaggcaccatcatgttgtgtttgaggtggagatggtatataatatgattgtgatctcacttcttttagattaattccatcagttggtcagatggcatgtttatatattggggatattctcatgtcttgcatttatatttaagaggatagtgtacccccgacagcctccgatctttcagctcctagttggtctgtatctaacactgttctgtttcagttttgacagtgacctggaaagcctgtgcaatgctttgttgaaaaccaccatagaatctcacaccaaatccttgcccaaagtaccaggtaattgcatccttcccagtcttttaactccctttattctcttccaagtactgatatcttaaaaactgagtcttaatcatttatgggtttatggatttcttgcagccaaactgtcccccatgaaacaggcacaactgagaaacttcttggccaagaggaagaccccaccagtgagatccactgctccaggtaaagagaaccagtaactgggcctgtacatagtgatagggtgtggtggggtgtgtgtgtgtgcgcgcgcacatgcacgtgtgcatgtgtgagctagggtgctgtgtatgtgtgtgtaagtgtgtgtgtgttggttcttaataggggatagagaaaatgtctccagaatctgttgttaatctgaatagtggaataagaaccagcttatatatacttgatgaagcagcaaagtagtcgttttggcttttacactgttttctgcagtcctcaagttttatggcactgattcacaagggtttgagataggctgagctggatcctagcctctgctttagccagagaaggtttacttttctgatttgtgttgggttttgagtaagtttgcatctgggaaaaaggcattttaaaaaataaataaataatagaaaaaaataaaagacgaggtctccccatgttgcccaggctgttctcaaactcctgggttcaagttatcctcctgcctcagcctcccagagtgctgggattacaggtatgagccactgtgccttgccgaaaaaggcttcttttatgaaaaaagaagaaaaaaataagattaagcaatgttgattaaaaatacttacttaaaaatacttgcttaaagaagccataaatttttttcccattacattacctagataataacttcaatttaaagaaaaatttgtgacaattttaggcataactgctttgttttagtatccatatccaaatttttctttgagattctgttttcagttaaaatttttttatgccaataacaaatgcttttggtaatcagaataactgaaagaaatttaatcttactgatttatttttctgtactcacatagagctaaattagataaataatagtcacagacaagttaattttcaaataaattttttttacctaaagaatacattctcttggtaggtaattgggaaaaatatggaaagtataaaggagaataaaaaatattagctgagtgcggtggcatgcacctgtaatcttagctcttcaggtggctgaggcaggagggttgcttgagcctgcagctgcagtgagctatggtcatgccactgcactccagcctgagcaacagaatctctaaaaaaaattaaaaagttaaaaaattactctctctcaacccagatatggcctcacttagttattttggtttagttccaaacttttttctttgcatatgtaaatctgatttattttaaaatgaaattgagattataacagttttgtgtcttgatttttttctaatttaaaattcatgagcccttactattaaacaaaataaatgctggtggtgaagatatggaaaaaatggaagctttgtgcactattggtgggaatgtgaaatggtaaagccactgtagaaaacagtttggtggttcctcaaaaaattaaaaatgtgattactggatgatccagcaatttcacttctgggtatataccccaaataattgaaaataaggtttcaaagagatacttttgtatccatgctcatgacagcattattggtaatagccaagaggtggaaacagtgtgtctgttaatgaatgaatggataaacaaaatgtctgtctatacaatggaatattattcagtctttaaaaaggaatttttgacacatgttacaatataagtgaaccttgaggacattgtgctaagtgtcctcaaatagacaaatactgtatgattccacttatatgaagtatctagagacatcaaattcatagagatggaaacaagaataggggttgcctgaaggactgaggtggggggtcatggggagttattatttaatgggtatagagtttcagttttgcacagggaaaatagttctggagatggatggtggtgatgattacacaacaatgtgaatgtacttaataccaatgaactgtgtactttaaaacacttaagatggtaaattttatgttacattttaccaaattttaaaaattggaaaaaagatttaaacttaaaatcttaaccttttcctctgccttctgtgtttaaatattctttgaacacatgccttataaagacagcacaatatttccttgtattagaaggccataatgcctgttgctaatcttgttgccaaaattttctcagaacgtctttgttcacaaatctttagcccacatcagattatatatttagatagagtccttacaagtgagatttatgtaatttacttattcattcattcaataaatatgattgcctagtttgttccaatcagtggtaaataagagaaacatggtctctgcccacatgaagcttttcatttaagaggaggaattcagacattaagcagataactgcacatgatactcatttaatgttagtgggcatgctgggaagaataactcagcatgtaaacactttgaatttttaaaattgtgaaaaacaacacacattaagtgcacaaaacaaaaacgtatatccctgtagcctctacccaggtcaagaaacagaatattgccgttttttagaagccctcttgcataccccagttttccttcttcccctaaggcacgattatatgggcttatgtgagagttttgcctttgccttttttttttaatttgacattttttgttatttttaatttattattttgaaaaaattgaaacttccaattgcgagtacagtaagcacccacttacccctcacccatatgtttactactgtttgccacaattgttgctgaactatctgagaataagctgaagacaacgccccttattcctaaatatttcagcatgtgtcctcccaagaacaaaggtgctctcttacacaccataatacagtttgcaggttcaggaaatttaacgtatacagttatctcatatacagttgatactcaaattttgccggctgtcccacttacccctacacgttgattggatctaggatccaatccaggattctgcattgtgtaagttgtcattctctttagtcgccttttctttgttttccttcagagctttactatgtaagcatacctcccaaaacactatgatttggttttgcctgtttttgcataccacataaatccattcacttagtctctggacaggcttctcttgttccacatcaggcttgtaagatccatccgtgttgttgcctctagctgttattttagttgctctgtataggattctattgtatgaatatgctgtatttgtttattcattttcctgttggacatgtgctgctttcagtttatagctattacagaaaaggttctgaatattcccgtgtgtgtctctcggagcacatgtgtacttttcatttggttacatagctaggagtggcattgttggctcatagtctgtccatatgctcagctttcatagactctgccaggcggttttactaagtggttgtactttatcatcagtaaatgagtgttacagttgttccacatctttgccaaacttgatattgtcggtcttttttcttttaactattctggtaggactcttttgtaaaatgttttaaccatttggatatgttcttttgtggagtaccgaattaaatcttttgctcattcatttattattgaatactctgtcttattgatttgtacatgtttttatcaattctggagaccagcctttgttggttttgtgagttgcagatactcactttgcctttttgtcctcttaattatgtcttggtgaacagaagttcgtttttgtttttgtttttagaaacagactcttgctctgttgcccaggctggagtgtagtggtgcagtcatagctcactgcagccccaacctccgtggctgaagcgatcctcctgcctcagcctcctgagtagctgggactataggcacaggccaggccaccatgcccagataatttttttagtttttgtaggaacatggtcttgctgtattgctcaggctgatcttgaactcctggccttacgtgatcttcctgcctcagcttcccaaagcgctgggattacagatgtgagcaactgtgcccagcctggtgagcagaagttcttaattgtaaaatagtgagatttatcagccttttcttttatagttagtactttttgtgttctgtttaagaaatcctctatctctaggtaatgaaagtaggtatgcacctttattatcttccagaaacatttaagtttgtctttcacaattggatcaactttattgaggtataatttacatataaaactcacctgctggtagctgggtgctttttactaagtttacagaattgtatacccatcaccacatttcagttctagaacatttccatcacttaaaaagtttccccaagcttgtttgcagtcaattcttgttctacccaagcaaccactgatctgctttctttcttcttggatctgcctttttaaagaaattgcatatattatggagtctgatagtgtttgggtttaggttctttcacttagcatgtttttgttgttcacccatgatatgtaccatgtatcattagttcattccattttgtcattgaacagtattccactgtatagatatatttagttcaccctatcaataattgatttttgtgtgtgatataaggtatggctcatgtgtcatttttttgtgtttggatatctgcttgtcctaacactatttattgaaaagactctcctccctgcttagcagggccacttttattataaatcgtttatccctatacatgtatgtttgttggtctcatacactgattagaaagcactactgccacactgccttaattagtgctcaaataagtctcaatactgttctcttgctagattctagaggtgttctgtccaatatggtattctgcttactttgtttttttttgttttttttttttttttggagacagaatctcgctctgttgccaggctggagtgcagtggcatgatctcagctcactgcaacctctgcctcctgggttcaagcaattctcctgcctcagcttcttaagtagctgggactacagctgcgtgccaccaagcccagctaatttttttgtatttttagtagagatgggggtttcaccgtgttggccaggatggtctcgatctcctgaccttgtgatccgcctgcctcagactcccaaagtgctcggattacaggtgtgagccaccacgcccagcctctgcttacatttaaattaaataaaattgcaaggcaaggtggtgcatgcctgtaatcccagctgttttgaggaggctgaggcaggaggatcacttgagcccaagagttcgaggccagcctgggaaaggagtggtgagaccctgtctcagataaatatataaattttaaaaagaaaaataagtaacatttaaaatttagttttgcaatcccagtagccacatttcaagtgctcagtaggcacatgtgactaatggctactgtaatggcaaacacgtataaagaacatttcatcattgcagaaagttctacaattcagagtaggggttggcagatttttctgtaaggggccagctggagaatagttgaggtttgcaggtgctgtggtttccattgcacctacctaactctgctgttgtaatgggaaagcagccacagaccatgtgatgagaggggcatgtctgtgtttcagcaaaactttatatttctgcaaagagacagctggtctatggttgtagttttctgactcctgctctagaatgttttgcctttcttggtgttttacattttcatattaaccttaaaattgtcttgttaaattctacctccctgtacctagagtagtcaaaactatagagacagaactagaatggtggctgccggaagctggaggagggaaaatggggagttagtgtttcatggggatgaagtttcagttcgggaagatgaaaacgttctggagatagatggtagtcacggttatacaacattaggaatgtatttatgccatggaactgtacactttaaaatgtgactgtggtgcattttatgtcatgtatattttaccacaataaaaaaataaataaataaaaaagaagggaggcaggagaatcgcttgaacccgggaggcagaggtcgcagtgagccgagatcatgccgttgcactccagcttgggcaacaagagcgaaactccgtctttaaaaaaagaaagttttgggggaggaattttgccttcctcagccttcaaaggaaagttgagattttgattggaattgtattgagtctctagatcaacttgagaattgacatttgtgcagtagtgaactctcagttcctgaactgggtacatatttgtatatttgggtgttctttaatttctcttaatgttttctgcgtgggagacatgcacatcttttgttagattaattgctaaaaatttaattgcaaaaatttgttgctcttataatggtagattttttttccttaaattttatggtttatgttggatgtagtatcgagaaataccattgatttatgtgtatttacttacagccaacaacctggcagaattcatttattctaacacgtctgtagctgtttcttggccttgtaactatggaaacaatgaaatcctccatggatactaatggtgacgtttctgcctttccagtccttttgttattattattatcattattattattattattattattttaccttacttcactggctagaacctccagtgcagcgtaaaagtgtcgtgtagctctccttgatctcaaaaggagcactttctatagttcatcctaagatgtgaggtttgctgcatctactgagatgatcatatgactttctatccttttgtctccccaccctccctgccctcagtcatgtagctttctacctttccttatctgacgtagagtgtaaacagaataagattctttaaatttcagtgggacgctctttctaatgccaggcagttagctgcatccttgatcacagcagagagcagcacccattaatggtggaggcagcaccattggcatagtgagcagtccatgccccatgcttctgtgagtgagcatgcccattgcatctttcagttgatggggttcctccaccgaaggcaggtaaattgcctcagaaaggtgaaggaaggaactaagagtaccttcatgttacataggaccttggaggttacatagttattccagtgtctctttctgtctagttcttgaaggtgatgtgattatttgagtcatcttttattgttactatcaggaactacaataggattttggagaaattatggagagaaatttggccccaagaaaacatgggtttgtattagtttcctatggatgccgtaacaaattatcacaaacctagcggcttaaaacagtacctagttgttatctcacaggaagattttctttttttttttttttttgttatactttaagttttagggtacatgtgcacaatgtgcaggttagttacatatgtatacatgtgccatgctggtgtgctgcacccattaacttttcatttagccttaggtatatctcctaatgctatccctccctcctccccgcaccccacaacagtccccagagtgtgatattccccttcctgtgtccatgtgttctcattgttcaattcccacctgtgagtgagaacatgcggtgtttggttttttgtccttgcaatattttactgagaatgatgatttccaatttcatccatgtccctacaaaggacatgaactcatcattttttatggctgcatagtattccatgatgtatatgtgccacattttcttaaaccagtctatcattgttggacatttgggttggttccaagtctttgctattgtgaatagtgccgcaataaacatacgtatgcatgtgtctttatagcagcatgatttatagtcctttgggtatatacccagtaatgggatggctgggtcaaatggtatttctagttctagatccctgaggaatcgccacactgacttccacaatggttgaactagtttacagtcccaccaacagtgtaaaagtgttcctatttctccacatcctctccagcacctgttgtttcctgactttttaatgattgccattctaactggcgtgagatggtatctcattgtggttttgatttgcatttctctgatggccagtgatggtgagcattttgtcatgtgttttttggctgcataaatgtcttcttttgagaagtgtctgttcatgtccttcacccacttttggatggggttgtttgttttttccttgtaaatttgtttgagttcattgtagattctggatattagccctttgtcagatgagtaggttgtgaaaattttctcccattttgtaggttgcctgttcactctgatggtagtttcttttgctgtctcacaggaagattttctgtgatgatggaaatgttctgtatctttgttgtccaacagggtagctactagccacatgtggctgtagaggacatgaaatgtggatagtgcaatcgaggaattgatttttcattaatttgcttttgattactttaaatttaaataaccacatatggctactggctaccaaattggctaagacagccgtagcacatagcattggtttttagtggcatttgtttatgttatacttacattatgacaataaaatcttgcagagccatgtgcacatgggacacaaaagtcaataaatatttgcagagccattttaaataacttggggagggaagaaaaagggctagattattttgtttggtttttgttttttccaatatacaggaagtattcacttgcattctgaaatttatgatagaaagttaacatgacataaagccttactcttcgtagtctaaacagaaggccgggattcagttcaattcaattctattttctcttttgggtttttcttgttgttatttgagaaggagtctcactctgttgcccaggctgcagtgcaatggtgcaatctgggctcactgcaacctccacctgccgggttcaagcgattctcctgcctcagcctcctgagtagctgggagtacaggtgtgcaccaccacgactggctaatttttgtattttttagtagagatggggtttcaccatatttgccaggctggtcttgaactcctgacctggtgatctgcccgcctcagcctcccaaagtgctgggattacaggcttgagccactgcacccagcctttttttttttttttttttttttgagacagagtttcactctgttaccctattttttgtagagacagggtctcactatgttgcctaagctggtcttgaactcctggcttcaagcagtcctcctgcctcaatctcccaaagtgctgggattataggcctgacccactgcacccagtctcttgtattttttttttttaaacctaattgtctgaatcagaagaatcattagatttatctggaaatgttcgagacactcaggaccgaggacattctttctaatccattttgcgttggacctgttcttagaagcttatcattggaaggtgacagtaatggtgtgattgttcaccccaccatggaaacttgcctgttacatttctagtatattattattatactagtgagggctccaggcttctactttgacaccagcattaattctgtctcttactttttcacattcttttaacagccccaagatgttctcgttcacacacctcagtttctcaaatccccatctgagcaaagacccaaaaccatttttgttcacatttgacaatacctgctcccacttaaaataagtaataattaaatcattttacaagttgagtattttttttttttatcaacagtgaaaattacttagcttttgggcttgctttgagttgtctaaattgtgttttgtttggggcttttgtagccagcctgtctcgatcagcctttctgtctcagagatattatgaagacttggatgaagtcagctcaacgtcatctgtctcccagtctctggagagtgaagatgcacggacgtcctgtaaagatgacgaggcagtggttcaggcccctcggcacgcccccgtggttcgcactccttccatccagcccagtctcttgccccatgcagcaccttttgctaaatctcacctggttcatggttcttcacctggtgtgatgggaacttcaggtaagtaaacagtgggaaaggaaactgtttttccctatgatgtttctaactaatgacggaattgtaactgggtcttatactgtcacaccaatatggtggttggctccagcccacttttttttttttttcttttttttttttttttttttgaggtggagtctcactctgttgcccaggctggagtgtaatggcgcgatctaggctcactgcaacatccacctcctgggttcaaatgattctcctgcctcaccctcccaagtagctgggattacaggcgtgcaccaccacgcctggctaatttttgtatttttagtggagacggggtttcaccatgttgtgttggccaggctggtctcaaactcctgacctcaggtgatccacctgccttggcctcccagagtggtaggattacaggcatgagccactgcacctggctgctcaactcacttctgcttatattctagaaattagaagactgattgaaaagatgtgtgttccccttgaaagcagttgctaggccattgtgaggaaggagatggctctccaagtttatgcgctataacagtttttctgctgagccagcttgttttttaaaacagatctttttcagaagtaaaagggggctgtttgcttcagttataaagcaacatccacactcatatcttttaaatcctggctcatttcagcctgacttgtggcatattctgcctcagaactcaccagctctgatgcttgtggtcagtattggctcactgtactgacaggtgttgtgcccccacactttcagtacagtgtcagggctttgcatcaaagtgacttccagcagagaaaaataccagtgttaggtactagaatgaagagaatttgtgagaggggatcagggaattggtctatgttggtataaaagttgtatctcaatcagtatcaggaaatgatgatgtatcttagtagaggtgggtaggcaaatttcatgcgataactgaaagatatagatgccagcctgttagtttactggtacttttctatgttaacgctaattttagcattttccctgcagtcgaacataaagaatttaccaatttaaccttttgtattttcctgttctctcacccactcacacttaatttttcttttcctcttagtggctacatctgctagcaaaattattcctcaaggggccgatagcacaatgcttgccacgaaaaccgtgaaacatggtgcacctagtccttcccaccccatctcagccccgcaggcagctgccgcagcagcactcaggcggcagatggccagtcaggcaccaggtaaaagctgtagccccatacctgtacagaggctgattatgagctgtctgagtcacaggccaggacagcaggtggcaagaaacagtgggcgctctttggtgcccttcagaagagaagattgatgtgacagccctctcccctttgtggagagagttctaagaaagcagagactaggtctgaaaatctttgcttttaaggggagggattagaactgccacatttagttaaggtggaaatcagtggggtttgtttttttttttaaacaaaattgctaatcctacttttgaataatgtctgcttagagccctaaaattataacctttgaaattcgatcatcgaataacactagcgtcatctcttagtatcttacagattgcagctaccccaagaggtaggtatttgaatggctattttggctgggcatagtgactcatgcctgtaatcccagcactttgggaggctgaggtgggaggatcacttgaggccaggagtttgagaccaccctaggcaacatagtgagacctcatctctaaaacaaaacaaacacaaacaaacaaaaagaatgaccattttgtgtttgagtaatctgaagttcagagaggtgaaggttatcccaccaataagtagcagaacccagactctaaccctctgctctttttcagttgagcattttttcttctccaactatatcttgcatgaagctttttttttttttcttttgagacagggtctcactgtgttgcctaggctgaaggacactggtgcgatcacggctcgctgcagcctccgtgatctcccgaacccaggtgaccttcccacctcagcctcctggatagctaggactacaggcatgcaccactacaccaggcaaatatttaaaaaatttttgtagagacaggatttcaccatgttatccaagctggtctcaaactcctgggctcaagtgatccacccgcctctacctcccaaagtgctgggattataggcatgagccactgctcctgaccaaagctttttttttaacattgtaaaatttaacttttacagaaggaagcgctaataagtcagttagcacttaacatttcgtcagtggcttgtcattatcccaaactttctactactttctacgttaatgtacattgtacattaggattttacagtctgcgtagttggtctcaaggacttcagttatcactagttatcagttttataagctagtagttctcaactagaggctgcccccacttccctgtcctccacccctgaaacagttggcagtgttgctggcatttagtgggtagaggccaggaatgctgcaaaaaaaaaatctttaaaatgcataagacacccccacaacaaagggttatctagccccaaaatgtcagtagtgccagggtcaagaaacagatataagccaaatattttcattttagctgagtaaaattattttttagatgtatcactgcttacaacacttatcaatttagagttttttttaaagactaaaaagacataatagtttgatttaggaaaaaagaactaacattaaacagtgataagtcaaaagattgtaaagaaaaattcaaatattaaaacctttattaagacatctaacatatatattgaagaacaaaacaaagataacttttgaggtacctttgggctttctaaaaatagaattctttgatctctttaaatattacttggaccaggtagaatcttgccattgtgctgaacaggcctgaaatcaagttgatcaagtcaatgatctgtaaaacgttaaaatctattaggattgaggattgttccactcagcagaaggtggtgtgatctgtattatcatgttggatgcaaaaatttctaaggtataggcacctttgaatatgaaatatgaaagatgtgcagtcgtgggcaagatgttctggtcacttctttgaaagagggaataaaagagaattaactacaggtctgtcattctgcttgtgataaccactttcaccttggccagtgatgcagttagtaatgagccacaagctttgctcaggcttccttaattgctaattatagaatgtcattaagtcttttgggatacaatttacaattataagacgaaagctgatgaggaggtgtcagatatatgcctcttagtctcttctcccattattgtccaagctccattttccacattttattcattatgcctttctgtctcactaggccatgagtttctttagagaagaaactatagatacattttgtattcgcagcccctaacacagagcctggcacataataagcccatgttaaagaaagacagtgaatgagtggcagaaatcctgagtctagatgctgttaatcctctagctcaagctgcccttttccaggacagaccagcagtgtggcaggtgtctcagctctgtgtagaaaagctggccagagaattcttttcccctactctagtacattcgattcagttacaggaagccttgttccatcacctgtgttaatggagtaggccaggtgttcctttgaacacaatgctgcaagaactacctagagtagatttccttcacatgataaggctctaatctgcttgggctcatgtcttggtttttcatttatatgtggctagaactttttatcctttgctggaattaatatggtgttctctcttctctgtttaaattagctgtaaacactttgactgaatcaacgttgaagaatgtccctcaagtggtaaatgtgcaggaattgaagaataaccctgcaaccccttctacagccatggggtatgttctgactgcagtgtgtttcagcccctggctgcttctgtagtagcggtggactgcctgcagggagcagcagtgccactgtcacagtctggttttcctgcaccgccttaggttataaggggggtggcggctaagcctgcctacacaatgcattttcaggagactgtcctttttaactggccggtgacagttgcctcacaaacttttaaagtttgtcttgatgctgtatgctcagtttctgtttgccatgtgtaagtctctgtgtggtacacattaggtgtgcaggttgattttttttttttttttaatgccctaggggttccagagttgatgctttgggtctcatgcagacttgattctggaaactgtaatctcaagggtgacactctcctccctcacttcccttctccaggcatttctgttcttcccatttcttttgcttttgtataaaagacagcacctctgtttggagactttagcttctctgccatgccatgtttgagggctggattgttgctggtggagctcacttgtttttttggtggtggtggtggttttgttgttgttgttgttgttgttttttgttttttgttttttcttagacaaggtctcactcttgcccagactggagtgcagagtgcagtacgatcatggcacactgtagccttaaccttctgggcccaagccatgctcccatatctgcctcccaagtagctgctgggactacaggcacatgacaccacacccagctaattttttaattttttgtagagatggagtttttgccatgtcaccccaggctggtctcaaatttctgggctcaagtgatcctctcacctcatcctcacaaagtgctgtgattataggcaggagccactgtgcccagcctagctcatttgtctttagtcctcatctgtgttcggaattcagggtgctgactccctcccgctgccctgggcaggttcgcagaacatgcctgtgccctgctttgccctgcatattttgtgactgtgatccctttagaccaaccaccatcccctgtggcaaagggaagagttgagggacatttcctcacttggaacatggggatcttgaggactagtatcagatttcagggagttagtgtctggtacccatgattagtctagcagcaagaagggcagccatagaccttgtggttctccacagcgtgcccaccctctgccattgcacagagcagatctgcccacggttctgttttccctctctcaagtggccctgcctcactggtccgctggcctctttttttccatgttgttctgtttatcaacactgcttgtttgaggaatttttagttatctcagggccatactaacagccaaaaaacaagccttctctattactattttgtagtgacctcggagccttggtatgctgtttagaccaagatggtatttgtggttgttgcaagcttttcaagggaaagaactatgcattagagtttgggaattgtagccagattcccagcatagggaaggcaaggcagaatgttacataagatgggaaaactcagcatatggtacaggaagtattgtctagtgtttctgagatatattaggtgctaaccatgtatgagaagcaccttttggagattccacttctccttttctcaagcttcatttccctaaatggttcatctgagctgatctttgatgaagggtttgttcaaggagtaattttgagtctactctttctgacaaaaaatctcagacaacttaagaaatcttgaagaaactttctgttccattctccacagaattagactctggtataattatttcatgtgtatgcccagcatggtgcctgaaatgtagaagcattcctttcaataatcatttattgaataataggtaaactctactccaaacataaattgaaaagtgaaaattggtgtttactgccacccctccccaggaaagatcgagagaatatgttcattgtaaaatgacttgctttcagattcttttatgttttatttttaaaattattttcagccagctctcgtggaacagattcttttaaacagtagtttcctaagtgtattttaagtatttaattttgcagttagctttttctcagtggtatctacagaagattcatcataggatgagcttacatatttctgccattggtgtactttatgttcattggcctcatccattcagttcgttggaagagtgtttatctggcgccaacccacagctattcaaattcctttgcagtgctccatcgcttgattcagcagattcttacacagcgtctgctgtgagcatgatactgccctgggtactagagatagggtagttgaataagacaaaccaaacaagaagacagccgggaaactgccaattacacaaacacttattttggtgtgcattcattcatttattcattctttcaacaaatacttaatgagcatttgttgtatgccacacagtattcttaggagctggagataaactacctgttttgttgttaacaaaatagaccaaaaaaactaacagactgattgtttggagagacaaacaataatcaaaataaataagtaaaatatgtaatatgttagatggtgatatggtgtgatggagaaaattaaagcgggggaaaggttagagagtattgtctgaacatgggttataattttaaatagggtggccagggaaggccttctcaggaaggtgacctttgaatgaagagagaaaggccacacagcaggtctcattaatatctcggaagaaagctccaagcacagggcctgtagcaggagcgtgtctacaagttgaagagcgagccaggggggacctctggtgacgagagtagagggaacaagaggaagaatgctgggggagtaggtcaggaaagactgttggtggacagtgtctgtttgagtccctgctttcagttcttttgggtatgtatgtaggagtggaatcgctggattacatagctcaaactggtttacagaggtgctgcaccatttttcattcccaacagcaatgtatgggggttccagcttctccacatcctcaccaacactcattattgactatctttttggttatagtcatcctagtggtataaaatggtatctcacactatcagtggttttgatttgcatttccctaatggctggtgatattgagcatcttttcacgtgcttattggccagttgtatctttggagaaatatctatttagttcctttgctccattttaaaattaggttgtctttttatttttgagctctaagtttctttatataatctgtattcaagtctctcatcaagcatatgatttgcaaatattttctcccattctttgagttgtttttcactttcttgttgtgtcctttgacacgaaaatttagtccagtttatctattttttcttttgttgcttgtgctttaggtgtcacatgtaagaaaccattgcctaatccaaggtcataaagatttacaccgatgttttctttgaagagttatgtggttttagctcttatatctaggtctctgatccatttggagttaatttttgtaaatggtgtgaagtagagatccaacttcattgttttgaatgtggatatccagttgtcccagcaccacaacatatcttttccatccttttatttcaacttattttgtctttatatttaaaatgggtttcttgtagcacagcaatgtgaatgtacttagtatcactgaactacatgtgcacttaaaaatggttacttttaagatggcagattttgttaagtgtattttaccacaataaacaaaaataatttaaaaaaataaaatggatttcttatagattaggggtccccagccctgggctgcagaccagtaccggtctgtggcctcttaggaactgggccacacagcaggtgagcggcaggcaagtgagcattaccacctgagctccacctcctgtcagatcagcggcagctttggattctcataggagcatgaaccctattgtgaattgcacatgcaaaggatctaggttgcatgctccttatgataatctaactgaataaaatataaaattatagcctgatgatctgaggtgaaacagtttcatcctgaaaccatccccctccgctgtccgtctgtggaaaaaattgtctttcacaaaaccagtccctggtgccaaaaaggttggggaccacagttgtagacagtatatagtgggccttagcttgcttttttttaatcttgaccatctgtgacttttaattggggtgattagatcgtttaccttaagtgtaattattgacatgtttcggtttaaatctgttatatagctatttgtttctatttatcccatctgtttgttgttcagtttttgtttttctgcctttttttgggttaaatgtctctatgactctattttaacttttttgttgacttattggctataacttggtgttatttaagtgcttacattagggtttatagtatacatcttcaacttatcacagactgtcttcaagtgatactatattactaaagaatagtgtaagaatctaacagcagtattctattttctcccttcaccacctttatgctattgtgcattttacttccactgtattgtaaacctcatgatacattgttataaacagttgactatctttcctccccactaccccccagatggattcttcttctgtcgccaaggctggagtgcagtggtgcgatttcagctcactgcaacctctgcctcccaggttcaagtgattttcctgcctcagcctccctagtagctgggattacaggtgcccaccatcacacctggctaatttttatatttttggtagagacggggtttcgccatgttggccaggctggtctcgaactcctgacctcaggtgatccgcctgcctcggcctcccaaagtgctgggattacaggcttgagccaccgcgcccggctgactatcttttaaatacatttaaataagaagaaaaaagtttacatgtttatacatatagttaccatttccagggttcttcattcctgtgtctggtcccagcttgccatctggtataatttttcttctgctcaaaggacttcctttaatgtttcttgaggttcatatctgaattcttttagcttttgtatgtctgcagaagtctttatttcacctttgattttgaaagatattttcacagggtaaagaattctagattggcagtttttttctttcactgatttaaagatgttcctctactttaaaaataataactctagtaatgaccagaaacttaaaaggaactttaatccttttgtttttctaattacaaatgtttgttgtagatataaaaaagatagttaaaaagaacaaacttaaaatcacctttattcccaccacaaatgtatgattgttatttacacattttttcatccttattttatgaaaatgtttcttgttagagaaaaatttggatgcatgctgctttgtaaatttgtaaccttttcagcttaatcatgaaatgtaatcgtttacattttccatgtcattaaaaattcttacactattcgtattttttcttttctttttcttttttctttttcttttttttttttttttttttttgagatggagtctcgctttgtcacccaggcaggagtgcagtggcgcaatctcagctcattccaacctccgcctctcaggttcaagcgattctcctgcctcagcctcctgagtagctgggattacaggtgtgcaccagcacagccggctaatttttgtatttttagtagagacggggtttaaccatgttggcccggctgatttcaaattcctgacctcagatgatccacccaccttggcctcccaaatgctgggactacacgcgtgagacactgcagccggcctctctcttttttttttttttttgagatggagtctcgctctgtcactcaggctggagtgcagtggcacaatcttggctcactgcaacctctgtctcccgggttcaagcgattctcgtgcttcagcctcccaagtagctgggactacaggcacctgccaccacacctggctaatttttttgtatttttagtagagacggagtttcaccatgttggccaggctggtctcgaactcctgacctcaagtgatacacccacctcggcctcccaaagtgctgggattacaggcgtgagacaccgcgcctggcctattttttcatatttaatgtggattttttcaaagctctaatgcaattccgtcttaattatttaagttacttagcatctaaacattcatgcaggaaatacaatttgctttaacagacttttggatactattttaaagaatgtgtctttgaagacattaaatttaccaatggagaaaatagttggcagttatatttccatcgacagatgtcaaaaacgcccaagaattgaatatagagtgtttgttttcagtatcttctatcattttcattctttttccctgttgatttctttgtttcttcagttactcttgataagttccactctctcatatatgagtatgtatgaaaagatacatgtgatagtgattaagatttaccaaaataaaacataaccaggtctcttgttttttatgctttttaaaatcctgaaataagttacaagaagttgaggctttttacaacaatgggatgagtatttaccttgttgaagttcattaaagttggagggatcaatagcaaagggcctaggtgacattttaatgcttcacaacccaattttataattgtgtgtagagtacacatccatggaacatgtgtgcatttgtctgcctctgttggcatgtagtgctggtaatgtgtggccaaaaacagaaaaaaatgactcttctgtgttttatttttctccaagaacccgagtttccagactcttagtgatctgtgcctctgtcgctcatttctgaagcaggaactttagtgttgctggcaatgtcagtgtcatttgtagactcactcagtaaagagatgtctctttggggctctgttatagcaccattttcttcttagaacaaatatcaagatgaatttctgatatttttcaactccatattgctaaaaagtggaataaagtcacctaagatatggatacttctgaatttggcttttctatctcttgatcatttctagctattgatttccattgttttggttcatgctcatgcaaaaacgtttgaacatatttgtttgagagtatactgtttttttctgtgtgctgtcttggatcttgataagagatttattggatctggtttgttaattggtttactggctgattgcactgaacagcatttctttgcaggggtgtcacgtggtgtgtaggtactgtgaatcctaattttgtgtatttggggatttaggatactcaggagatacatagaattatcacaaataaatagaataataattacactcagtcttattcatgcataatttactatcatgtcacaattgaattctggctgtaaaaaattttctaaaatttggataaattgctgcttttatttttatttctgatttctgtttgtctttgagaaagcatgaaagagtttcctttcctttgtaatccttgtgagctccaacctcttctctaagcaagtctgctgtgtctgtccaggtactgctcagggcccagcagtctcactcacacattcttttcctctggtacagattcagcggaggtgacgggggaacactgtatctgtattgcctgcttggtaaactatctcaggggaacagagatgtgtttctccagagagatgcatatttatagctgcttctggcttcagtagaagcatgaaacgggttttgtttcattgaacataagttcactttttcttctctctcaatctaataaagtctgtttaggaaggtccccttgttattccagcagagaatctcaatatgcttgtaaggtttgttaagctgtttgataattttcttccgtgaggcacaggcctatcttttatcttctaagttcatttttgatggaaaatatgaatcctccctaaatctaggggagttctgaaaaataaccaggtcctacaactactactgctatatataccagtcagagtagcgctgggctgacaacagataaattgaaaaaattgccgctaggagccaagaacttttgtgtgtgattacactaacaggtagttttcccatatgtgaacactagttattgaaataacagttcctcacatacagtattcacctacttcagagttaacaaaagatgatgagagctctttctgcgaataggggtatacttttcatgctgtagcaaagatgcaggttgggaatggaacagtggtacatttgaatcccttggatgctgacctggtgagccctggagatagctgctgtgagaagctaagatctctttggatagcacctttgcggtagcagcgaattggatgcataggtggcagtgagaatgcttcccatagagcctgcttgggtaagagaatcaggaatttctcgtggtctacaacagggggaagggccagggaggaggagggcttatactctggatagcaaaaagatctagttctgaatggttactaatttttttctttggattgcagaaaggaaataagttataaggccactgctttgactttcatgctaaaaacccaaagttcatttttaaaatttatccttcaaaaaaaatgtcaaatcagttgtattggggtcccatgcatctgtatcctacccaaaactggtattgtatattggacagaaggttggcttgagaatgaatgtgatttttacctagtcatgcctttctctgagtgtatgctttgtgtgtttttcagttcttcagtgccctactccacagccaaaacacctcacccagtgttgaccccagtggctgctaaccaagccaagcaggtaacttactgatttttactttttttttttttttttttttgagacagagtcttactctgtcgcccaggctcaagtgcagtggtgcgatcttggctcaccgcaacctctgcctcctgggttcaagtgattctcgtggctcagcctcctgagtagttgggattacaggcacccaccaccatgcccagtcaatttttgtagttttagtagagacgcggtttcaccgcgttggccaggctagtctcgagctcctgacctcagatgatccatctgcctcggcctcccaaagtgctgggattacaggtgtgagccaccgtacccggcctgagttttacttttaacattcatgccgtgtctgtctttgtaagtgaagaccatactgtttttaagtcttgactttgtttaaatgaaccataagtctgataaaggcccataatcccttccccacaatttatgccagtcttgacatggctgttaatcagggtaggtcagtcaggacctgatactgtcttcataggccatttaaacattctgcacctagtaatttggggtcataattctaataccatacatttttatatgaagtattttgctttgcagtttactttcacattatctcagttaacccatacaacagccgtgtacagtgggaggataggtgtttagatatgtctcactggtgaggcagcctaggcttgagtgaccaacgcaaactctcacgattagtaaatggtggaaccagagctgggacccaaggcttctgacttcctcctgtccattgctcgtttcactacacagttgagtatcaatgtctggggtataggttatctggttttctcctgcaatccctgtttgtcagagtttgcatatttttagtgatgttatgtctagcttgtctagcttcaggcttttgcctgataaacattgtcccttagaaaaataggtgatattgcaaacagttaaacaatccagaaaaaagtgataggggatggttggaaggtcagtcaggctagtgctgaaactcttcctaagaagttctggtttctctcactactcttacatctgtctctgagatgagtagtttgtgttagagatcagaatttgagactggatatcaggacttgcctatttaagttctcaaacttgcctctgttccttagtttaccataacttaaaatggcatttaagcatttagcattcgatctttcttctggaggtatttgtgttcaccatggaaaacacatgataaggcataagtcatggcgagtgaaggaacattgactggagatggataagtcagttttgcttttaaccttattgtacatgctttgagagctagaaccattttattaatttactccttcattaattcatctacctaatagtcaagtgcttttgatgtgctaagcactgtgctaggcactgggaagatagccatgaactaggccagtgtgactgccttcttggagcttgcagagtatttctattttcatcctttaatatgatcttacatatggttaacttaaattgagaccttttttttgtttcctttttctttttggtaatttatctaaaagtatttgtccttgcttattttaaattatatttttgtgtttacattttacatatttctttgttacaaagaatggttagtggtttaacataaacattttgcttgcattctgttataggggtctctaataaattcccttaagccatctgggcctacaccagcatccggtcagttatcatctggtgacaaagcttcaggtcagtttgcatttttgttttcttgaaaagtgaaagaagcactccacaataggggttattgttctggatcactgagacagttgccataggaaacaggagtcacatttgatgagatcgggagcattcagggtagtatgaccatagacaagagatcatatttgaaagccgtcagctaatgaagaatttctagaaaattagtatgcccttcaatggctatgtagacttctgaaatttttaggttagtttgaaaatgatagagcaataggagaaaaacctccctttaaattcttttcctaaaatggagcaatagtattatctttttcttccttgctggatgatcacagttgagaggaatggatcagaatgctaaacgctatttcttccactaaaaggaattaaaaattctgttggtccacagtgacagttcaaaagcctataaggtagagaaagtgaaacagatttgtaagatctcagagtatataatgagtcgatattatgagattttatggcttcacgtaacttctcctacactcactcaagcataattattcttaatttagttttcacagtaaccatgagtgttttgaccagacactttgtccaagtgtcattgcccaaaccaactttatgcagaatgtgggtcttcctcagtgtccccttttgttggctcctttattatagcctacctaatttggcgtgtattacttcctgctgcaagggtcttgtgctgtctgcaatactgaatttttacaacactgttgattctggcatttgtttcaatcatgctcttaagtgggccttcaagcaaattctgttagaaattgaacttcatacattagcagcctgcgtctcataatcttaatcatacagtcattctgactttctctgtaatcccaaactttctgattggatactggatttatctttagtagctattccttgcagaaggaagccattattgcataagccagagttgtattctagaattcggagtgatatggaaccacagttggtatcatgtacgcctcacatgagaaggaggtatctagcacttctcgaccggggcctaaagctttatgttaaaaggaaaattatatagtagaactgtcaaagacttgagtattttacaaaaaggttttgaaagatcatatactcttttttcaaggacttcattggagaggtttttgtcactcttggagttagaatcaaagaaacctaaggaactttgctttatgcatgtctgggcaagtagtgtgacttgcaagaaatttccgagattcaccattcattgctgatcatgaaatcctctcttttgttacgaggtgttcacttctgttttcacttgccaggtaatcaaggtttagaaaagaacttttttcttttggtaggaaaacttccctgaaaggtgctgcttaagagtttgcaaaaagtttctttttgaaaaagagcatttctaaaacctctagagaatagttctcttattagtaatggaaataccttcattgtttttctgattgtaaaactattacatgcccagaaaaagcctatggtgtagagatatataatgtagaatgtgaaagctgccctatagattctgtattccagagatcatgatttcatgtatatctcttgaggttacttcattgttttttaaagaaaaatatcctatatactgtatatcctatatatattgattttgtaacttatttccccttctctgccccctcttacaataaatgtcttggtctctgcaggtctgatacagatccaccttactcattttaagagctgtctacaacctcattgtgtagttataccctgttaaatttaactagtactctgctgatgatttagattgtgacttttcatcctgtacattttacattgtatatcagtagttttaaaaatatttgtactgccatctaccctgtgtttgtttattttagaaggttggtgttttttttttcttgttgttgtttggtttagtttcgtttgatttgggcttttaaatagttttcctctttcctttcccccttttgaagtggagcaaggccaggcctggtggctcatgtctgtaatcctagcactttgggaggccaaggcaggcggatcacctgaagtcaggaattcgagaccagcctggccaacgtgatgaaaccctgtctctactaaaaaaaaatacaaaaattagccgggcatggtggtgcatgcctatagttccagctgcttgggaggctgaggcaggagaattgcttgaacctgggaggcagagattgcagtgagtcaagattgcgccactgcactccagcctgggcgacagagcgagactctgtctctaaataaataaataaataaagtagagcagtagggaaaagattgaagattgtacccaaactataagtaagtagttagagtgaaatcgaacatggggagaatgatggattgcacttttaacctttttgcatgtctccatattatagcaatcatgttttacatctgtaattttaaaaaaagaacacgattatttgttaaatgccaacaaaatctgtggaaaatgcagaaatgtatatagaagtaaacagccttaaagtcactactcagaaatatttagcttatgaacctatttctcttttggatttttgtccttcagcatagattaatttcaaataattataaagctacattatatatagttttatttacttttgtggggagggggcttagcctcacattataagcattttcccataccattgaaatatataagagtgtacttttaaaactgtacatttaaactatactagaattattttgatatattttctgtaaaggagaagatggcacaccttagactggaattaacattgacagagccacggagcaatttcagagacctcaaacacaagtgaggcaacgtgctcactccccatggccactgacgtgtcacagaaggcaaatgtggtgctaagcagcacctcacaggctgagctacagggaattatacactggaacagtgtttctgtctttttgtaatattcttttttttttttttttttttttttttccataatttcagggacagccaagatagaaacagctgtgacttcaaccccatctgcttctgggcagttcagcaagcctttctcattttctccatcagggtcagtaatgaacttaagttttatggcaaattactagcaattagcttccccaaatcttacaattatagatatatttatttacttattaaatgtgtatgaacccagagttcttaccatggcagtaatacatgtgatgatagtggcagtagtttaatgttctcatgtaaatcgattttccctttgcaattcaagttaatacttgtttgttacatatttgtgtatctgttttgttttttagcctaagcctcattttctttgagtaatgagtctgctaaattctgtagttcatctagtttgtcacactgagatgtttccattctgacaccattttgggggctagatgtgacattcaaattgactttgctggacaaacatggtggctcatgcctataatcctagtgctttgggaggccaaggtgggagggattgcttgaggccaggagttggagactgacctgggcaacatagtgagacctcatctctacaaaaaattgaaaaattaaccaggtacgttggttcacttctatagtcccagccacttgggaggctgaggtgggaggatcccttgagcccgggagttcgaggttacagtgagctatgatcacaccattgtactccagcctgggcaacagagtgaaaccccgtctccaaaaaaaaaaaaaaaaaaaaaaaaaaaggcttactgcatcgagagtacagtatactaaacttagagaatgtaatgaaagataataggcatttgaaatttgaggttttatatagatgtggaggaatctgtttccgtttctttaaaaaataataataataatgatggctgtacttgtaaagttgagttgtttttaaaaatgaaagaatcttctataccttatctcaagatgagcctttgttaaggtgcctgttctctgtgccctgagcgctcatgttgaaacctgtgtgagctgctgaagcattgggttagactctgtggaactgagatcaaaatgtgtcaaaaggattttttgccattgaagcattgtgcattcagttccttagaaaagcctcttaagttcttcagtttatgcttttgtaactaggagcatattaaccagtctctttttcctgattttaatatattttttgagtgtccttcagcctaaggagaaaagagggtattagaatattatttgagggggaaagtaatacatatattttttctttattataaatcattatgttttatgcttcccaaaggtaatttgcagcaaattttaaagagtaggtcaatgccaagaattattgcatcctttacagatggctaataatcagtcttctgtgaaatgatattcttcttccttttctttttttttttttttttttttttttttttttttggattttcaggcagagtatcactccgtcaccctggttggagcgcagtggtgagatctcagctcactgcaatcttcacctcccgggttcaagtgattctcttgccctagcctcccaagtagctgggatcacaggtgtgcaccaccacacccagctaatttttgtattttagtagagatggggttttttcatgttgcccaggctggtcttgaactcctggcctcaagtgatccacccgccttagcctcccaaagtgctgggattgtaggcacgagccactgcacctggccctcttcccatttttaaaataacccagaaaaggtggggtcattgaatcaatggcttgacactattagataaaattttttcactaagaaaggttgtgtttttttttttatttttaatatgatgggcaaaggtgtctaagttattacattatttagtatatttgatgtgcttggttcgttatattttaaagctagtttgaaatctgcaatttgaactttgcgtgtgtgtgtgtgtgagatagagcaagattctgtctcaaaaaaaaaaaaaaggtgcagtggtacagtcatggctcactacaacctccacccccaggactgaagtgatcctcctgccttagccccccgaataactgggactacaggtgcgcgccaccacacctggctgatttttgttttttaatttttcggttttggtttttgggggtttttgtttttgtttgtttggtttttgggtttttgtttttgttttgtagaaacagggttccaccatgttgcctaggctggtctcaaactcctgggctcaaaggattaacctgcctcagcctctcaaaatgctgggatgtgagccaccatgcctggcctgagtttttatcacagtgaataatctgttctgattcacactcgcgtgggattttcttccttagctatggtgtcttcacttacagtgtaaagaaaacgtacaaaaggagagaggagatggtgaaaggagtcacaaagtttttgaactagattttcctagccgtaaaactcagttctgtcaaaatgactgagttagggcttctatttcattgtatccattgttttccctagcagtgtggggctctctgacatgcttgttggtcttggaggggttctgagaggctctccctagtcttaagtgcttctgtcttaccagaccttccttctgtcccctcacttaacagaccatctgctccggccaccattcccacatgcacatttgtcatgtgtctctactgctgcagctttgctcatcttgcaagaagtccccactcaaacttctgctacagaaagcccagccatcccccaatgggctctcaactgctatccctgtcgtatctcacacacaaactgcttctctgcttagagatcatagagtggccttactgcttctgagataggtgctttgactctgttgtcatttatcttctagattgtaaattcctgagggcggtttgtatgaatgaatgataaaatggaatattaagagggcaatattgtgccttggtttgttcctttttaatttctctttttccacttgttaggactggctttaattttgggataatcacaccaacaccgtcttctaatttcactgctgcacaaggtacagactctgtgttgagtagcattactcatgtgttttctctaaataagtacaggttatttttgcccacatgttagtatttgacttgttcctgaatcttacttacagtatctgcaataagctcagtgttgataatgtgcattagaaatatgcttaatttaagaaactgatgtgaaggatttctatttttataattaaggacaaggaaaggatttgcttctagaaaatcagggctgtgctttaacatttaaatgttaacatgtgaattaaaatttctccattttttgtctgtaatttaaaatttcttcaatttatagggtgattctgtagggcaagatagacatggtaatagatagactgtagaaatgaaagaccaaactcgtttttttccttgataacataccagcaaacacactcatcccatgcatgttgttaaaaatccatcaatagactgggcgcggtggctcacgcctataatcccagcactttgggaggccgaggcaggcggatcacctgaggtcaggagttcaagaccagcctgaccaacatggagaaaccccgtgtctactaaaaatacaaaattagccagccgtggtggcgcatacctataatcccagctactcaggaggctgaggcaggagaattgcttgaacctgggaggcaaggttgcagtgagccaagattgtgccattgcactccagcctgggcaacaagagtgaaactctgtgtgtccccccccccccccgcgccaaaaaatccatcaatagcatgtttttaacatttaaaagaatttgaagccctataaagaaaccagatctatttgttaagtgcctttcagttatccgtttatgattaagtcttttattttatttatttattttgagatggagtctcactgttgtcatccaggctggagtgtaatggcgcaattgcagttcactgcaacccccacctgctgggttccagcgattctcctgcctcagcctccctagtagctgggattacaggcgcccaccaccacatccagctaatttttgtatttttagtagagacagggtttcaccatgttgattgatcaggctggtctcgaactcctgacctcgtgatccacgtgccttggcctcccaaagtgctgggattacaggtgtgagccaccacgcccggcctcgttactcttgtatttattaaccactgttgtttgaccaggccttatgggtgctttacccatatttcctgcgatctttgtaacagcacaatgaaggtaggtattgtaatgatctagattttccaaatgggggaattgaggctcagagaggtaaagcaacctttccagattcacacaaccagcgagtggcagagtgcatagctccagagcccatgtccttgaccaccagaccgtactgcctctgtcaaatagctgacttagtagagcactaataagtagccattaattgtacataaaaatgattttctgtggactgacactttatttgctcataaaaatgaaggaagaacttccattttgaatcaagtcctggtctatcaggaggtccacaggccattgctgtgctgaggatgttattaaggaaagcacacagctagggtaaattaagggaagaggcttttttatttctctttgggataatatgttaatttcacatattctagatattttgtatttgttgtgatttaatggtcataaaaaaagtattttttccttttcacctcagacgactcagagctgatgtttgtgtggagaagcactcattccacctccttagagaaagctgctgtgagaacaaggcaccctgactctgtagagggaggagagaaactttggcttagaaacacaatcagtggaaatgtaatgggtcatcttttgctaaatccaacccattttctgatttctttttcttgctaggggcaacaccctccactaaagagtcaagccagccggacgcattctcatctggtgggggaagcaaaccttcttatgaggccattcctgaaagctcacctccctcaggaatcacatccgcatcaaacaccaccccaggagaacctgccgcatctagcagcagacctgtggcaccttctggaactgctctttccaccacctctagtaagctggaaaccccaccgtccaagctgggagagcttctgtttccaagttctttggctggagagactctgggaagtttttcaggactgcgggttggccaagcagatgattctacaaaaccaaccaataaggcttcatccacaagcctaactagtacccagccaaccaagacgtcaggcgtgccctcagggtttaattttactgcccccccggtgttagggaagcacacggagccccctgtgacatcctctgcaaccaccacctcagtagcaccaccagcagccaccagcacttcctcaactgccgtttttggcagtctgccagtcaccagtgcaggatcctctggggtcatcagttttggtgggacatctctaagtgctggcaagactagtttttcatttggaagccaacagaccaatagcacagtgcccccatctgccccaccaccaactacagctgccactccccttccaacatcattccccacattgtcatttggtagcctcctgagttcagcaactaccccctccctgcctatgtccgctggcagaagcacagaagaggccacttcatcagctttgcctgagaagccaggtgacagtgaggtctcagcatcagcagcctcacttctagaggagcaacagtcagcccagcttccccaggctcctccgcaaacttctgactctgttaaaaaagaacctgttcttgcccagcctgcagtcagcaactctggcactgcagcatctagtactagtcttgtagcactttctgcagaggctaccccagccaccacgggggtccctgatgccaggacggaggcagtaccacctgcttcctccttttctgtgcctgggcagactgctgtcacagcagctgctatctcaagtgcaggccctgtggccgtcgaaacatcaagtacccccatagcctccagcaccacgtccattgttgctcccggcccatctgcagaggcagcagcatttggtaccgtcacttctggctcatccgtctttgctcagcctcctgctgccagttctagctcagctttcaaccagctcaccaacaacacagccactgccccctctgccacgcccgtgtttgggcaagtggcagccagcaccgcaccaagtctgtttgggcagcagactggtagcacagccagcacagcagctgccacaccacaggtcagcagctcagggtttagcagcccagcttttggtaccacagccccaggggtctttggacagacaaccttcgggcaggcctcagtctttgggcagtcggcgagcagtgctgcaagtgtcttttccttcagtcagcctgggttcagttccgtgcctgccttcggtcagcctgcttcctccactcccacatccaccagtggaagtgtctttggtgccgcctcaagtaccagtagctccagttccttctcatttggacagtcttctcccaacacaggaggggggctgtttggccaaagcaacgctcctgcttttgggcagagtcctggctttggacagggaggctctgtctttggtggtacctcagctgccaccacaacagcagcaacctctgggttcagcttttgccaagcttcaggtaagaatttgtggaagctttttacttgtttccctctctgctatttgaaacattagcaacagacccctattacttttgtaattaaaggggagactcaaaacccaaaaataatctgtaggttaaagaagacagcttggagcacatgtggtctcaggaacttgtttggcctaattggctggatctgttacagcttaatgcagctccagttttgcttcttagcaaattgtccactctgcaagccaccagagtgtgtttcatggggaaaaatcaagcatctttagttgaggtcctgccaagtaatttaatgaacaataaataggaaatttcaaatttggaaggcactgtagagatcattatacccaaagctgtcaagcctcaaggagactgctctaatgtcaggatagtgccagtggaaccagcaggagagtccaagtgtcatcatagtccaccgccctgccagtgttttctgtctcctctgacaccatctttcttactgtaatggcagtcactgacatttgatttgggttcttttctattttcagtgttatgactttttgtaaaaactacagtttactgtttttgacagtgaaacctaattcttctctattgcattttccattttagcagctacttttacttctaaaagttatcaataagcaaggcaatttgaaaatctgtcctgagatttgctttctgaaagttatcttatgaaaggtaattcttcagcaatagactctaggagaaaagcaaggatcaatgatttcatggtgggcaagattactagtaactgctaattcattattcgatgataacttgaaaatggttcataatttattagaaaggaaacattttcctttcttcaacaaatgtttgttacactcctcctaaattcagctataaggacacggtgttgaaaagacagatatggttttgagacctacccaatgccctgtgaagaggccagagggctgctgaatgatgggaaatgtgctgacttggtccagaaaatgggcaaggagaaggccctatgagtcttagaggagaacgtgtaacacagtccgtatcactaccacaccatttgctctgcagtcagaacctgagaagacctcatgcacaggcatggtcatactatttcaacaaattcagaacccaggaaggaatcttctttcatttagtatctgtgcggaaaggtatctgagctgtctacttcagccctagttgaggaattgagtcttgtctaagctcacctacccaatcagtgacagaaatgagaatagaggctgggcatggcgactgacgcctgtaatcccagcaattcgggaggccgaggcaggggaatcacttgaggtcaggagtttgagaccagcctggccaacatggtaaaaccccatctctactaaaaacacaaacattgccgggcgcggtggctcacgcctgtaatcctaacactttgggaggctgaggcaggtggatcacctgaggtcaggagtttgagaccagcctgaccaacatggagaaaccccatctctactaaaaacacaaaattagctgggcgtcgtggcaggcgcatgtagtcccagctacttgggaggctgaggcaggagaatcgcttgaacctgggaggcggaggttgcagtgagccaagatcgtgccactgcactccagcctgggcaatagagcgagactccatctccattaaaaaaagaaaagaaacgagagtagaactcctgccttctcactccttgtctggagctcttttgttgtatagttctgcctcatgttcccaggccctgttcagctcagcacttcaaccatgttatgccatctggaagaaagataaactaccctgaaaagaatgtggtatctgagattcagaagaaaccgaggagtagaaatattcataatattaagtcattagaaagaatttctggtcactgaaagtgaggataaactattcttagcccccatccacgtggggtttggtaggagaggattcattccccagggctttagaacttacactattttaaaatgttagcaatgaaaaatggtctttaaagtatttgctcagacttttctccatactagatgaggaaacattttattcataagttgatttattatgggctatcttagcacacctgaatgtcatttaaaaagaaataaacttaggctgggtgcggtggcccacacctgtaatcccagcactttgggaggccaaggtgggtggatcatgaggtcaagagatcaagaccatcctggccaacatggagaaaccccgtctgtactgaaaatacaaaaattagctgggcgttgggaggcggagcttgcagtaagccgagatcgcgccactgcactccagcctgggcgacagagcaagactccatctcaaaaaaaaaaattagctgggcatggtggcacacacttgagtcccagctactcaggaggctgaggcaggagaatcgcttgaacctgggaggcagaggttgcagtgagccaagatcccaccattgcactccagcctggtgacagagcgagactctgcctcaaaaaaaaaaaacaacaaaactttaatgttgtaaaagactcatccaatccaaattgaatttttgttttctttgtattttacaggttttgggtctagtaatactggttctgtgtttggtcaagcagccagtactggtggaatagtctttggccaggtaaatatgcatttgtcttcattcacgtcaacatgtatcaaacccattcagttttcttcactgtaatgtagtcagttcgtgttgtatatctaaatccagcaaatatagccctgtgtggttcttaagctgtactcccttcagctgccttggaggtgcagaagtctcagcctctgattaaagaggatcactagaattttgatcctccttccacagtcttctgagaaagtattttgaaagcacattgcctgattccttttttctttagacacaggatcttgctgtgttgcccaggctgtagtacagtggcacaatcacagctgactctagccataaactcctgggctcaagcaatcctcctgcctcagcctccccagtagtttggattgtaggcatgcaccataacactcaactaattttttatttttgtagagacacagtctcgctatgttgtccaggctggtctcaaactgctggcctcaaacgatcctccacgcctgaccacattgcatgatttctatcagtcccctgcctgttaggccaagggttgacaaacttcagtctgtgggctaaatacactgtttggcttttggggggtttgttgttgtttaacttcttaatctaagaatggtgtttgtgtgtgtgtgtctatatgtatacatatatgtgtgtacacacacacacacacatatatatatttttgtttgtttgtttgtttttgtttttggaggcagagtctaactctgttgcccaggctggaggacaatggcacaatcttggctcactgcaacctccgcctcccaggctcaagtcatcctcccacctcagtttcccaagtagctgggactataggtttgtgccaccacacccagctatttttttttttctttttgtgtttttggttgagacggggttttgccacgttgcccaggctggtctggtctcttaactcctgagctcagggtgatctgcccgccttggcctctcaaagtgctgggattacaggcgtgagccactgtgcctggccagtttttatatttttaagtggttgtttaaaaagaaaaaagaggaagaagatttggcaacatatatatcccctctgctacgctatatgtagcccagagactccttttggtgaactgagctgtttgattttatgtagctagcagttatctatgtgccaggcataattttaagtcttttatttatttatttatttatatttatttatttacttatttttttttttgagaccgagtgtcgctcttttgcccaggccggactgcagtggtgctatctcggctcactgcaagctctgcctcccaggttcacgccattctcctgcctcagcctcccgagtagctgggactacaggtgcccaccaccgcacccagctaattttttgtatttttagtagagacggggtttcgctgtgttagccaggatggtctcgatctcctgatctcgtgatccgcccacctcagcctcccaaagtgctgggattacaggcgtgagccactgtacccagccaattttaagtcttttatacaaattaactcatgtaagcatcacagcacctccataagataggtgcgattattatcgccatttaagagatgaggacaccgaaggcccagagaggttaaattgactgttacatcagacaccggctgcatttagatcatttagatcatagtaacctcctaaggagcccttatgaagaaagataccctaatttatcagaaaggattgtgactttctgaaggtagaatttgtattagtccggcagttaataaagtggtaggcataatatatgtttcttatacatcttcaggaagaaattttctttatcatctctgttttcctttgaagataggctctgtcctagtcagtgatctttcttaagagagaagtgaaacttctgatttccagtttctggtagtagaggactaagtcattcaagggaaccaagttccctactgaaaactactaaaaaatgctagataaaacataaaaaccttgtctttaaaagcaccaataaactaacaaggtattttaccaagccaaaaggaaaatggggacctagagaagtggagcccagaagccagttgtgccctgacagcatttactaatctgagaaaatgtgaattttctatttaataaccccaaaggtaaagggacaaaaatcaccaactaagatatgcacaaagtggggagtctaaaagagacccttcagctgggactccatgttgacaggtctcagcccctgactagactgatatggttccagagtgatgctgcctccaggtgtctggcagaggcagcgcaggcccaccctgaaggaaaggaactttacttagccttcgaattactcttacaagtaatttctgtccctcaatgagacacacaaggaaaccaggaactatgagcaagagccagaataagcgtcagaaatcacctttgcacagactacctaaactgtaaatcagctggggcttacagagtttagaagaaatcaaagacaaacttgaaaataccagtaaggaatataaaatcttaagaagtgtcatagcaaatttgaagaagaaccaaatagaatttctaggaaaatgtaatgattaaactcaggtgtaaactcagtggctgtatttggagcagattagacccactgaaaggagcagtggtgctctagaacagaatgtggtagtcagcgtttccagctttgagggctatcgatagcctctgtcagaagcacttaacgctgccattgtagtgcagaagcagccgtagacaatatgtaaacgaatgcgcatgattgtgttcagtaaagctttgtttacaaaaacaggcagtgagctggatttggcccctgcgctgtagtttgctgacctaactagaaggtaggttaaggtgagttacctggaatgcatcacagagagcgaaatgaaagatacaaaagagaaaaaatcctgtaggagaaaatccaacacacatttaatcagagtcccagaaggagaagagagaaagacagaaccttccaaaactaatcgataatagtaatccacagattcagaagcccaacaagtgccaaacgagaatgcataaaaggaaactgattctaagacctgtcctagtgatactgaagaacaccaaagatgaaatattaaaagcaactagagaaaaaagacagattatcttctagggtgccataggcagactgacagcagacttttcagcaatgaccatgaaagccagaactggccacctagcatttctaaatccagcaaaaaaatatctataaagaatgaagagaaatcaagactttttttcagataagcaaatactgaaataatttatgtctagcagacctgactccagtctgggcgacagagcaagactccatctcaaaaaacaaaagaaattctaagagatactgtttggaaagaaggaaaatttgacctcactaaaattatggccctcttaattttagggtaaaacaagccattaaataggaaaattgtagcctatgtaaccaacagtgtaattgtattcagaatatgtaaagctttcctatagttcaaaaagaaagacagctatacccaaattaaattaaaaggctgacagtaccaagtattggtgaggaagaagagcaactgggaactcatattgctagtgagagtgtaaattcatattaaccactttggaaaaccatttggcagtatcaaaactaatatacaaaatccctcttggcccagcaaatctaccctgaatatgtaaccaacagaaatgagtgcctttgttcaccaaaagatattgataagaatgttcacagcagaatattcttaatagctaaacacaggaaacagcccaaatgcttatgagctaaagaatgcataaataaattgtggtatattcatacagcccaatactacagagaaataaaatgtactgctcctatagctggcctaggtttgtttttttgttgttgttttgtttttgagacggagccttactctgttgcccaggctggagtgtggtggcatggtcttggctcactgcaacctctgcctgctggattcaacctcagcctcccgagcagctgggattataggtgcccaccaccacgcccagctaatttttgtatttttagtagagacagggtttcgccatgttggccaggctggccttgaactcctgaactcaggtgatctgcccacctcgacttcccaaagtgctgggattacagtcatgagccaccatgcccagcctaaatttgttttttaaagaaattcgtgcacgtatgtatcaggatacaagtgtattcatagcaacattgttataatagcttacaactagaagcagcccaaatgtttgtcagcattcatatgggtaggtaaatttacattattccacatagaatttttttcttttttcttttttttttttttgagacagggttttactcctgtcgtcaaggctggagtgcagtgatgcgatctccactcactgcaacctttgcctcccaggctcaagtgattctcctgccttagctacccaagtagctgagactacaggtgcacacactgtgcctggctaattttttgtatttttttgtagagacggggtttcacatgttgcccaggctggtcttgaactcctgggcttaagcaatctgcctgcctcggcctcccaaagtgctgagattagagacatgagccactgtgcccaaccctcttttctttttttttgagacaggatctcactctgtcacccagggtggagtgcagtggcacagtcacaggtaactgcagccttgatctcctgggctcaagcagtcctcctatcagttctccagaatagctaggtccacaggtgcaccaccacgcccaactaattttttcagttttttgtagagatggggtctcaccgtattgtctaggctggtctgtaactcctggcccaagtgatcctcccacctggacctcccaaagtgctgatgagattacaggcatgagacaccatacctggtctcatagtagaatattatccagctatgaaaaggagcagatttcagctccatgtataactaacaagcacaatgttgagccaaagaaatagaaaacatcactgtgataaactccatattgttacttccccttccactccgtattcttccaccacggaaattatgtatgcaattggaagggccaaagattgaaatcaaggttttttctatgatggcaggggccttattgtttttattgattgctgtatctccaatgcttaggactatgtctggcacatgataggcattgtggaaatgaatgaactttcaggtagcagaagtatcctcagaaaactctaaagatgctaggcagattctggctaggatgtaaaagaatatagaaaaccttcactgccataataacaccaagaaaaatccagatgatgtagaagtcacacttactctggcagtattggaattatttactgctgtataacaaattgcctcaaaacctagtagcctgcaacagctacttatttattatagtcttggattctgtaggtcataacttcagatggacttagtagggatggcttgtcttcacagtatctgtgatctcagctggaagaagggaagactggaggcaggagtcatctgaaggctcactctgatgtcagtggttggcttggctgttggctcagaccttagctggagctgttagctgaacacctacatttggcctatgtagcctgggcttcctcacaacgtggtggctaggttccaaggaggaacattccaagaaagaggaagagccatgctgaagctgtataaccttttatgacctatcctcagaagtcacagaacatcacttaggctgcatcctcttcatcaaggcactcacaaagtcccatccaggttcaagaggagatacagaggccgcctcttgctctagaagagcatatgtgactagaagtattgctgtgatcatctttggaaaatatctgtcataatgggaccattgaagagtggcagaaagccttgttgaactggtttccagagagtggagcccatcataggtgtgagcactgtggcacagcagctgctgggggcagatgccaggtctgggtttgagcaggtagtagagaggacttgccaaagactgagaaaatgtactggctggagaaggagctgttggcagtgatgggggcaagcaaaataaatgaccagtaattacatgaaaaggtgatcaagtagcattaaactaatgagggaaatgaaaatcaaaaccacaattagataagataccacttcacaccccctaggatggctatcatttaaaaagtaaaaaataaaaataaccagtgttagcaatgatacaaagaaattagaaccctcatacattgctgatgggaatgcaaaattgtgcagctactatagtttggtggtttctcaaaaagctaaatatagtacttctaccatatgacccagcaattctgctctggggtagaatacccaaaggaattgaaaaaaagggattcgaacaaatacttgtacatcaatgttcattgcagcattattcacagtagccaaaaggtggaaacaacccaagtgtcaaacagcagatgaatggataaacaaaatgtggtatatacattccatgggatatttttcagccataaaaaggagtgaagttcttggccgggtgcagtggctcacgcctgtaatcccagcactttgggaggctgaggcgggcggatcacgaggtcaggagatcgagaccatcctggctaacacagtgaaaccctgtctctattaaaaatacaaaaaattatccaggcgtggtggcgggtgcctgtagtcccagctactcgggaggctgaggcaggagaatggcatgaacccaggaggcagagcttgcagtgagccgagatcgcgccactgcactccagcctgggcgacagagcgagactccgtctcagaacaaaacaaaacaaaaacaaaaggaatgaagttctcggctgggcatggtggctcacacctttaatcccagcactttgggaggctgaggcaggcatatcatgagtcaagagatggagaccatcctggccaacatggtgacacaccgtctctactaaaaacaaaaattagctgggcatggtgaagctcgccggtagtcccagctacttgggaggctgaggcaggagaatcgcttgaacccaggaggcggaggttgcagtgagccgagatcacgccactgcactccagcctgggcgacagagtgagactccatctcaaaaaaataaataataaaaaggaatgaagttctcattcatgctacatatagataaactttgaaaaccatatgctaaggctgggcgcagtggcacacacacctgtgatcccagcactttgggaggctgggatgggcagattgcttgagctcaggagtttgagactagcctgggcaacatggcaaaattccatctctacaaaaaaaaagacccacaagttggctgggcgtggcagtgcatgcctgtagtcccaactactaaggaggctgaggtgggaggatcacttgagctcgggaggtcaaggctgctgcagtgagctatgttcctatcactgcactctggcctgggtgacaaagtgagaaccctgtctcagtcagtcaaatttatttatttatttagagacggagtcttgctctgtcgcccatgctggagtgcagtggcacagtctcagctcactgcaacctccgactcccaggttcaatcaattctcccacctcagcctctcaagtagtagctgggactacaggtgttcactgtcacacctggctactttttgtatttttagtagagttggagtttcaccatgttggccaggctggtctcgaactcctcaccttaggtgatctgcctgcctcggcctcccaaagtgctgggattacaggcgtgagccactacacctggcctcagtcagatataaaaattaaaaactcagattgggatctgaaagacttgtaagtgcaacaataatttattcagcatacatatcctccagctctcccccgctaatcctccccaactttgcaaagaaaaaggaactaaagcagcactaaaaagtagaaagaactcacagggtcttacattctcctgttttctggaactcttgtttgaaaggtgatacttcctcttgcctcccacctcagatacttacagaccaataacctaaaacctaagtggagactgttgggctaaccagaggtgagctcagtcttcttaaatctgtgactctgttccagatcaacccttagtgaaatctgaataattatttcctcactttaatcagacgaaatgggagctctcactctctaggaaaagcattaatgttcttcagtcaccactgttcttccataatacaaacatacagagcaaccaaaaaagagagtgacacccacaattaaatttttaaaatcagcaaaaaccaacctatagatgattcagatattggaactggagacagactttaactgtcatgttcatagggcttatgggaaaatagttgaaacagtggttgaataaggaatctcagcagagaaatggaagcttaaaaaaaccaatggaaaggccgggcacagtggctcacgcctgtaatgccagcactttgggaggccaaggcgggcggatcacgaggtcaggagttcaagaccagcctggccaacatagtgaaaccccatctctactaaaaatactaaaattagccggcatggtggcgcgcccctgtagtcccagctactcgggaggttgaggcaggagaaccacttgaacccaggaggcagaggttgtggtgagccgagatcacaccactgcactccagcctgggaaacagagcgagactccatctcaaaaaaaaaaacaaaaacgcaagtcgttatctgtatttgaagtttaaatctagtacgtgaaataaaaaacaaaataggcttaacagcagagtgaatactacaaaagaacagtgaactcgaagacgtatcaatagaaattatctaaaatgaaggtcagagagatggaaaaaaaatggatagagcatttctacgatctatgcaacaatatcaggcagtccaatatatgtgtaatcagagtcctagaagggtaggagacagaatgggtaggataaattcacaaaagaagtgcaaaacttatacaatgaatactataaaacattgttgaaattaatgacaacctaaataaatgaaaatacatcccatattcatggatcagaagactcaacattttgttaaaatggaatactcttagctagtaaattgtagaaccagtactgaaaccaaggtctgttcaaattaatttaatcattcatataggaattcatggtgagtaggacaggcaaaggtggctgtgttcatggagcctccattagatggagggagtcattctttaataaaacggtataatttcagatagtgttaagtactgtgaaataaagcatgatgtgataataattggggaagatggtttaggttagatggtcaggaaatgcctctctgaaaaagtctcataaatgtctctttttctttttacattttgttttcttgaattaggaccaaataaaggccacacattgagattgcttgctatgtctcttaagtctctttatgtataggttcctctttcatatctcgcttttgaatttttcctggtaattcagttgttgaacaaagctggtcatttgtcctgtggcgtttcccatgatctggtttctgactgcacagcttccaagtgaatgccatctgttgcgggaagtcagggaccccaaatggagggacctgctgaagccgtgacagaagaacataaattgtgaagatttcatggacatttattagttccccaaattaatacttttgtaatttcttacgcctgtctttactacaatctctgaacataaatcgtgaaaatgtcatggacgtttatcacttccctgatcagtactcttgtgatttcctatgcctgtctttactttaatctcttaatcccgtcatcttcataagctgaggatgtatgttgcctcaggaccctgtgatgattgcattatctgcacaaattgtggagcatgtgtgtttgaacaatatgaaatctgggcatccaaaaggaacaggatggctgcgattttcatggaacaagggagataaccattgggcctgactgcctgaggggctggacagaacagagtcatatttctcttcttacaaaaccgaataggagaaataacactgagttctttttctcagcaaggaacagccctgagaaagagaatgcattcctagggagaggtctctaaaatggccactctaggagtgtctgtcttacacggttgtagatgagggatgaaacaagccccagtctcctgtggcaccccaggcctcttaggattgggaaattcctgcctagtaaattttagtcagaccgattgtctgctctcaaaccctgtctcctgataagatgttatcactgataatgcatgcccagtgggacatgaaacttcatcagcaattctaatttcaccctggtcctgtgatctcgctctgccccatttgccttgtgatattttattgcccttgaagcatgtgatctctgtgacccacaccctattcatacaaccctccccttttgaaatccataataacttactggttttgtggctcagggggcatcacggaacctgccaacatgtgatgtctcccctggacacccagctttaaaatttctctcttttgtgttctttccctttatttctcagactggccgacacttagggaaaatagaacgtatgttgaaatatcgggggctggttccccgatagccatcctcagccctctgttacttcctctgcagtggtggttgggtctagaggcttgaggagagtcaagttaattgtttttggcaatattgtaagtctggatcttaaacacttactccttactccttacactatattaaggcattattgttaaaattttcggatataatggtcatgtagtgatggttttttttatagatttatacaggaaaattagtggatgaaatgatatgtctgagatttgctccactgtaataaaggatgagaagtacttgggggtaaagacaaaatctgacaggccatgagttgagcattgttgaatctggctgatgggtgtctggagggttcattatactcttctgtctgctttttgtagtttttagattttccataattttgtagtttttagattttccataattttatgttttaaagcctgttgttatttatctcaattaaaatgaatggaattctctctcacccatttatgaggatgcaataactatcaattcatgttgacttcagtaaaatatgttagtgatctacttcattttcatgggaagccattatttatcaaatcacttttttttttttttttgacggtgtttcgctcttgttgcccagactgaagttcaatggcactatactggctcactgcaacctctgcctcccgggttcaagcgattctcctgcctcagcctcccaggtagctgggattataggaatgcaccaccacgcccagctaattttgtatttttagtagagacagggtttctccatgttggtcaggctggtcttgagctcccgacctcaggtgatccacctgcctcggcctcccaaagtgctggcattatgggcatgagccgctgcacccagcctgtcaaatcacattttaaaaattaagctgaaccatttgaggtttctgagctttttcaggcaaaatgctcatatactggcaattttctgtgtttcagcctgatgcatggacgtcagctaagcagtcaaataccttccacatgcatgcattcattgttaggttttctaactttccatggcagtttactagttatcagggccaatgctgttaggactgaattggattcctagtttttaaaagctgtgactcaccattaaatggttgtagtgaattggtactgttgttgttgttgttgttgttgttgttgttgttgttgttgttgttaagaaatttaaagggggaaaaaaaaagagactaggaagtacattaagtatgttaccctaagacagaaattagcttgttgtatttgaggcacagaagatatgtgtgactgccctgagtgagggggaggatgataaaagatgatgtcagagcagtggaaaagggacagatcatgttgggccttctagaattggtagacaggagtgaaatgatgtgactgccattgcaagtagtgctccagctgctgtgtggacgtagactgtagtgggagcaaaagaccagctaagttgttgcatagtctgggcaaaaggttggggttaggtggctcagaccagagtagaaaggaggggataccctagggggtggggggcatttcagaagtggcccactggaggtttgatgagtagagattaagtgattacttagaaaatacttaggaatgtgcctagcacatacagagtgcttgatttttggttcattgtggttaaaacactgaacagcaaccattttttgagcatataagtctgtttcaggctctgttctaaagtgtgttacatttcttggctcacgtaattcactctccgctgtgttgagatgggtagtttattaccaccattttacaggagaggatccatagcaccgctctgctcttgcaagtttctatgcacagtggcccctttccaaagtccatcttattctgcattctcagccacggagagatgacacttaactaaggtgaatggcccctcaaatgtagcccagttgttctttaagaaccagcttccagagaagttaagtgtctgggacctgacacagcctcgagtcagcatttgcccctgtgctagcagcatcctctgagcatgagatttgcaaacttggacagaattcagctttggtcatcatttcaacaatgaagctaatttaagcttacttctgcagcactgggaaagtcattatgaaataaaagtgcacaaatggagagaaagacagtgaaaatcacttatcatccattgctaatgagttcagccaaacgctggaggaatcagaataagtggtgtccgtaatagcttgtaaatgttttcgaactttttatttggtggatctcttgtggggttggttttcctgaccctggcattgtgtcaaacagacactgcgggcagtgtagcagataaacattaaaagttcccacctaccataaatcatgttttcagagaactgtgaacatggaatagcttgagaacttctcatagataggaagtccctgtccagagtctagcttcttttgtggtggttagagcatttgtaccagaactaatcttgctttttccatttgtgccagctgtgagcacctcctgcccacggatgcagcctgccatttcacgatgacctctcatcctatcttgcttcctgacccttttgttttttagcaatcatcctcttccagtggtagcgtgtttgggtctggaaacactggaagagggggaggtttcttcagtggccttggaggaaaacccagtcaggatgcagccaacaaaaacccattcagctcggccagtgggggctttggatccacagctacctcaagtaagttgagaagacttttcccagtcccttggtcccctaatgccattgtcattcttagggtgttatcaaagcttcagtgacaaatataaaaagaaaaaaaaatctagaaggctcatttaaaatatcttccccaaagcagtgtgatctgttttgcttttttatttttggttttttaatgagatgtcctatataatcatgaaaagatatcagagctgagggagaggatctgtgtattgagctgctcccctcttctctcccaaggcccaaatcgctctgtttcttagtattggagtgacttgaagtgaatgcaagcagacaagcataaatgagcagcagcagagcaagccgaggatgctgggaggagagcatgcagactttcatttggatagtactctccaaattttccttaaaattcagctcctgtagggagatgtcacccaaaagttgaagcctttaatatttctcacctcttacatttttgttttattttcatctgaagctgtatctgccagtactttctttagctaattttttttttttttttttttttgagacagagtttcactcttgttgcccaggctggtgtgcaatggcgtgatctcagctcactacaacctccgcctcccaggttcaaatgattctcctgccttagcctcccaggtagctgggattacaggcacgtgctatcacgcctggctgatttttatatttttagtagagacagggtttcaccatgttgaccaggctggtctcaaacttctccgcccgcctcggcctcccaaagtgctgggattacaggtatgagccaccatgcccagccttctttagctaattttaaaaattcttttttttttttttttcttttttctttttgagacagagtcttgctctgtcaccaaggctggagtgcagtggcgtgatcttggctcactgcaagctccacttcccgggttcatgccattgtcctgcctcagcgtcctgaatagctgggattacaggtgcccgccaccaagcccggctaattttttatattttttttagtagagacggggtttcaccatgttagccaggaggtctcgatctcctgacctcatgatccgcctgccttggcctcccaaagtgctgggattacaggcgtgaaccaccacgcccaggcttttttttttttttttccttttttttgaaacggagtgttgctctgtcacccaggctggagtgcagtggtgcaatctcggctcactgcaacctcccaggttcaagcaattctcccagctcagcttcccgagtagctgggattacaggcacctgccaccaagcctggctagtttttgtatttttagtagagacggggttttaccatgttggccaggctggtctcgaacccctgacctcaggtgatccgcccacctcagcctcccaaagtgctgggattacaggcgtgagccaccgtgctcggccttaaaagttatttgttgacctgtgtattcatggttggaaatgaaagaaatctgtttgtgtagatctttatcctgctgctcaggcggaagctgagattagaagttgggagcctgtcctgtttgtctcagcttctctcatttaatgtgccctacatgaagtttctctcatctgttgtgctgtgtgagatctccatgaatcatgagctagtgttctgcagtcatgacagatgtttccttaatattaaggcctgtgcagttagcaaaactttctatcctgatttgcccttctaaactcctaaatcaaaaactagtcagttttttagttcagcctgggcaacacagcaagtccccatctcaaaaaccaaacaaacaaaaacctagttattttgatgtcactgtccactccactaatacataaggaaagattattgtcaagagacacataccttttaccttgtgaaattatgtaatcagaagtttttgttctttaggtttcagtctgccaggagggatttagaatcctggatcttagaaatcaagtctagtagttttcaaaaactgtttttgccaatgaactcttaagtagcatcctgataaggaaaacaaaagtaggttcatgctgaagcaggggtcaggaactccaaaacacacagctggctggcaccacaggaccgtgaggctccatagcacatactttgaaaacatcgtccttttatggctcttcattttccattgaggaaacaagcccagaattctgaggtcacagagccagaaagtcacagatatagaactcagctagactatatgtcacatgccagacacagaatctggcacagaatagacacttaataacatgctccactgcagttagaaatttgggtttatcccagagctaaggtatcatctgcgaggttgtgttactggccaattttgttaaaagttaaatgtgtcatatccctataaacattcgtttactcatctctaatgccatggctcttgactgtcaaggagttgccttctgtcagtggctggctgcagctggtttgcacggacacatgagagccagccaagcacatcttcccagttgttcattaggtgacatcgtttggggtaacctgaaatgagccattgtggagtatttatatcatggaaatcagaaaaccctacaaaccaggactccccagcctgtcaaacattactggctgattcttctaattctggtttaaagtaaacacataactattcttgataccagataacctgttagtcttcatcttctaaatgttggctgttaactataaaccaacaatttacatgtgtgcctaagggaagtttaagtgattttgaaggagtagaggaaacacttaacattgtattattttaaaaactatatgattttatttcaatagtttttggggtactaggtgtatgattcaatagtgaaagggacaggaattgttttaactctgagggccaccaagtacagaataaaaggaaggaacagtggagaaggaagagctgggagtcgtctggggaaaggcattgtcctcaccacagtactcaggatcgtttctgcagaatcatcagtgacagcttctttctccttaattgactctgcatcatttgatgctttgagcaccacttctttcctggactgtatgaactgattctcctggttccttctgcctttcaaacaattcctcctctgcttctcttcttatctctaccttctctccctcccctcaccaacccccgcactccccgccccattttgctatggggcattccccgtggtcatctgttcatcacaatcttcttctcccttccccctggctcttccattgtggtctgaaaatccatgccaaacccgagtcttaagactgcatttattttgccccttttcctactcaaacccttgggcaacttcccactgactataggataaagatgaaataaacttgaaactggaattcagggccctccttgagctggccccaaagtacctttctgactgtactcagttccccagcacattccttctggtttggtcagtttgtctgcttgcatccctccctcacttcctccaggttcacttggcaccctgcacccaccttctgagcctgtccttctttaaaagatgaatgcaaggctgtttctgtgtgcactgcacctttgcctgagggtcattcaggcccaccatgatcgctccctctctggaaatcctgcagcccttggatttcatcactacacaaaccatcaagcagaaggaaaccagcctttattaatcacctgctgtgtgccagaagctcaatgcacgtgagctaaccacttcttacaacagtgcttttagatgtggctgtccccatttcactgataggaaaatcaggtccaagaggagatgtatactgcagaagttgcacagctactaagtggcgtagccaggatttagtccagctgcgtttcccgagctctgattggccttgtttacagaacgtctcccaggtacgcctttttgggcaacatttatgcatggaaaagaccccattatagagagttatttgagcagtcccctttgtgacatttatgccccgggctgctttgccctgaaactgcccactttacccctgagaagtcgtgagaactataacaatgaccgcaaaagacaagctgagaacaccagtacttggagttggcatgttctgtatccagaagctcaaagcttgcaagaagggcttcttctctctgtcatccccatagaatctactaaagaaaacctgggaacccatggagacatctaaaattcaccaccactgtggattgttacccataaggacctgttgcctcctttagtattgtcctgaggacactgtgtagggccattcccagcacattctttctgtttagggtcctgaaagacatatttgtctcatcagaagatgaagaagccgtttgatgatgatcttgtgggtttacagggtccctctacaactgttctttaagaaaatatcttggaaagtatcctgggcaagagcttcctgagagaccctttcggagtatgcattgaattcttgttcaatgactttagacctgcaggatgatatggggcctggtctgatactctgtatcggatttaattgctatccagtttatattaagtataatttaattcagattgggtcaggccctgatgttggatgatgctagtgtttttgccaaataaaagaccaaagaagatccatgttttgccagcagggtggaagcccagagcagatgccagttttacctgtacttggcacccctaaagtgtcagtcacagatggctatgcaaagacaaacttgttttttttactggatagtttatttacaagtcaagaagaatcttctacagtgaaatattgttcggtccgccaagatattctcttatggtaatatgagaatatggtaacatattttcaaaaactagagactatgttattttggaaccattaggagaaaaccaagaaacacattgttgacattagaaacagagactcagtcattgttttatgctactttgtttcagagcagtttaaatcaatggtaaaatgtctcaacatgcagagctccttgagagactgtaaatgagagtgattacagctttaatggtgtcattcttgggatcttttaaaaatgaaaaggatttgattatctcctgctgacctgctcagtgtcttactagctgaagtgtgattgagatgtggaaggaagaggttgaaggaacagagaagggcagcagccttttccgagagtctacaacataccacactagtgccctgtgtgcatcatgttatcttcccagcatccctgcagagtcacaattgctgtcctgttctgtgtgtggggaaactgggacttaggatagttaagtccttgcccagggtgacacagctattaggtaatctcacccgggtctgactgcaaacttcactgcttgttccactatgatatgccataaagattttaaagtcaaagagttcttaaagagagaaaaagattaaaaagcccaaagacttctaaatgatctctgacttcccaccactgtcccaataacatcatttcacctcacatttcatatggttgcaccaagtttctccaagaggagattcaaccccagtcttgcccttgaatttgtttgctatttgaattttgcattgctagcactaacaaagtgcaaaaatctgttcttgaaataccaagtaaacggaatggctgagaagcctgttttcatctccattgtcaaatgtactgccattgaaggaatcagacgtaactttgggctagctcgataaggggaaggtcaaactgctcagaaggccattttgtgggactccgtcaagggatacattatcctgtggtaccgagttatgagggtgatacaaagggatttcttaaccacccagctgccagtacctgacatacctgacatgtgggtccttagccaggctctcaaattgtcagcagtggttttatagggcagtgaccatgatgtgatgggccaagtcatattgtattactggtgcctggaaatttgaggtgactgggtcccaaagtgaggccactcacttcctggattgtggattaagagcattgcatctggacgtattaaccatggtggctctcctattagagttggttggtagcagcatgagttgagagacctggggaggtgacaggttaatgggggggccacctcttccaacagctcgactttgaaaatgatgttaagtgctccccctcctccagtcctctcctttcactttgcttgtgaacacctgactggcttagggagagactggtccttcattacccacccagtgattacccagagcatatgctgtgcctcccatttatgccttgtgtctttgggcatccactccacttcaggatagcttctccctgccttgtgggcatatattcaataaaacacccatctagacgtggtaggaaacgtgagttattccttcccttcccaccaacgcccaccccccccaaaaaaagtttgaaaactctgacatatcctgtgctatattatctgagtgacagctgctgtgtatgtggactttgtctgtttatctattattatctgtcaggtttgcatttcttgtaacaggtgaaaaaaaattctcagccatcttggtttttagtagtttccttttttcctttaattcttggagtgaattcagtgcatagttgagagggggatgaccccctagataagtatctaaaaggtcaagggcttcattaaacctcttagaggaaatctgactggaagtcttgctagcctctttaacattcttcagaccatccctatatccccttggatcaaagacaggagcaccatgatttttctcatttcactgccattctctgagcagctcaggcagccataagcatgctgaacttgactataaaagcaggaggtaagtgctagaagccattatgcctgggttggatttgttctaactttaatttccctagtttgacaaaatttgaagttggtcttgtgtgaagagaccaatcaaagtaagccctgttttccagaagaaagcagcctgtggggcagagcccatggcctccattgctgggcagtcttgacacttgcaggagcacccagtgagcttctacaaaggagccttttcagtgggacctctcactgctcctttattttgtgcctataaaatcatgccaggaaatcctgagcctgggtgccagaatgattaaaaacttcccagcaaggtgcgtgaaaatcagagaaagtacctgttgctgtcactgtcgctccgctcccttggcttctaggcggcttgtcactcccatctttccaaacacccaactgagactttttctgtgttctgagaagcaggtaaggacatttgtctccctctgacctccctcacatcttcatctcttcagatacctctaacctatttggaaacagtggggccaagacatttggtggatttgccagctcgtcgtttggagagcagaaacccactggcactttcagctctggaggaggaagtgtggcatcccaaggctttgggttttcctctccaaacaaaacaggtactcctatgtctatttgttatggttatctttatatatgtatttgtttatgcatagatatctggaaggagacatctctagggtggttatcttaagagagtaggattggagtaaagaagttaactgtttcctccgcattatttttatatttactgagcatctgctacattcctaacatgattccaggtcttccaaaacatgtttaaaagcatagaatgcaagtaatgcaacatttttttttctttttttttttgtgagagggagtctcaatctgtcgccaggctggagtgcaatggtgcgatctcagctcacagcaacctccaactccctggttcaagcgattctcctgcctcagcctcccaagtagctgggattacaggcatgtgccaccatgcccagctaatttttgtatttttaggagagatgaggtttcaccatgttgggcagtctggtctccatctcttgaccttgtgatccgcccacctcggcctcccaaagtgctgggactacaggcatgagccaccgcgcccagctgtaatgcaactcttaagagaacacagattcttcttggggagaaaacattgtaaatatttgacagttgcagaacaaacaaaataaaggaacacataaggaaatgataactgaagtatctgcaggaaagcatcctgagtcatggatttgttggggttcccattatttgtgagggtcaaagcagattatctgtttaatttctaatgtgtatgttactttcccctctttcgcaaatcactttttttttatttttatttatttatttatttttttttttttttttttttttttgagacggagtctcgctctgtcgcccaggctggagtgcagtggcgcaatctcggctcactgcaagctctgcctcctgggttcacgccattctcctgcgtcagcctcccaagtagctgggactacaggcgcccgccaccacgcccggctaattttttgtatttttagtagagacggggtttcaccgtgttagccaggatggtctcaatctcctgacctcgtgatccgcccgcctcggcctcccaaagtgctgggattacaggcgtgagccaccatgcccagcccccaaatcactttatttttaattgaagtatatgtttatccacaatccacataagtacacagctgaattaattatcacagttggaatacacccatgtaaccaaggaaaaggaacattactaggactactttttatcccagcattactattaaagtatatatttatataaactatatgcctttttataatcatgtatgatgtatttataactacaaatttttaatgaacagtgtatgtttagatctgaaaacatgtacttcatttctgtcatctgcctctccaccctgtttctgtctctgagatctgcggagagtctgcactcctgtccttgttgatggaaagttgtgtgaaaagagttttttttaagacaggtggtccagggtgggctgtttgagcaagcagctttttaaagcaaactccccctgggtaagtgggcaggacacttggccctcgtatgcaggggatgctctgaaatatgctaattccagaggaaggatctaacctcaggactagatgcatcagtggctctgacctgggagtaaggctgccccaaattaatacatggagtctcatatttagagcctaaagtgctgtggtttccaaatccactgtgcaccttacctcagattgtgactcaggtagcttagtctttctttggttgctagttgttaatactgttttcctagaaattaaaacagaatattctgaaatgggcttcacagctttctttttgctacacacacagtgcattgtttaaaaatgaaagggccacaaggcttttatcccagttagaaaggtgcatcgtgaacatttcaactggggaattttagttcatcgatcatcaagactttttatgtttttaggaggctgataatgttttctttgactcttaacagttttcctatatatggttctttatcctgagattatatccccattgatttggaaatctgacctttgaaaattccacctgtaatcccagcagtttgggaggctgaggtgggaggatcacttgagcccaaaagttcaagaccaacctgggcaacatagtgagaccccatctctaaaagaaaaaaggaaaatcacacctaattcagacactgggtacagtggctcacgcctgtaatcccagcactttgggaggccaaggaagacagatcacttgagtccaggagtttgaaaccagcctggataacatggcaaaaacccgtctctacaaaaaaaaataatgcaaaaataagccaggcacgttggtgcacacctgtagtcccagctcctcgggagactgaggtgggaggatcaattgagcctgggaggcagagattgcagtgagccaagattatgccactgcacttcatcctgggcaacaaagcaagactctgtctcaaaaaaaagaaagaaaatctgacccttttatttgtctagtcttagagaaaatgtatgccccaacttttcatagtaagtacttatttgccccatgaaactaatacttagattgaggcctcgaatagagaacaactatctttcagatacataagatgagtgaactagtaaccataaacatcaaagtgagggcaggggaaaggccactccccctcatgtttcaggacttcatctctctgctgcagaactcgtattggttctgggagagctttttctattgaaagaggggactggaagtcccgagcagaaggaagggctgctgtgaatagaggaactgccttcctgtccaggcatcagggcactttttgctttaagagagattttaagttgatgatttggatgggtctttgaaaaattccaaaagtatctatcctcccttcagtaaaattgcattataaaattatcctgctggaggtcatccggggagaggacaggaggaaggtgggatggactgaagatggccttgctgcccaccatggtcagtggtctacaccctgctgtctcgctaaagtgttagatttggagggaggcaggcaggggatgaatgatggggaagatgagaggtgggcgtttgagtcgcacagaccttgttccagtcccagctctagcacccatcagctggctgaagttgggacaagtggcatattctctaagtctcagtttcctcccctgtgatgtaaggatcccaggcttattgggaagatttaagaaaactgctgtgaagcacctggcatatagtgggccctcaataaatcagaaagtttatcatcattgattattagaaaatttgtttcttctggagaagaaatttatgaaaatacggcaactgataaaatcaaacccctcctgccatcaggagagagttgcctctttaagccagagtgactgttttcttcctgtttaatttggctgtgacccaggtgtgttgtttgggggctttttctctctgtgtatatttaaccgccacccctcccctgtccagtttattttctgtatcatcatgacttcccatttttcactcaccttccaccaagaagtctaagcaatattgatacaaggtactagatagcgccctgcatgtctaggaagaaagtgtaactagatctgtgatcagtcttaaataattcaactgtaagggttttttagcactttttttttttccagtctgttatatttataacccaacagtctccattatcatggcttggaatttcactcagtgttttaacatgcggaatgttaacccaaacacgagccttagcaaaaaagtatcttctcagttgtgcagcctaccactgttaatggcaaataggcacatgagtgaatcacaaaataacagttaactgagggattcagctgacaacttttcatacccaggatttgatctttcctgattcagatggcagaagcttgtgttgtgattacataaacaataagaagtctggatttcatccctctaacaacagattgactttctgaaaggggagaaaaggcttgtcgctaggccaccattactcccgctagcacgcagttcataggccaacactcaccttaagaagtactccctttagagggtgctcccagttagagcacatttcttatgccattctattccattcattcaagaagacactcactgagtgtctattctaatactttagaatgatttcagcagtatcttggaagtttgggaacccgcatcaggaatagctcaggagaggatgttttgtcttcctgcctgacaggcatcaccagcaatcagagtagggtgccctgtgcgtgacctgacccttgtctgtgtggccacctgtgtggtgctgccctctggcagcctgagcccactgggcagcagtgttggcaacgttgcagaaggcatctgaactctagggctgtcctcactgttgacttattattttattagatttatgcagcagcctgcctccaaagaagaaatttggtgtgttttttcattgggaagtaattccagactgcaggaaaaaagcatttaaaaaaaaaaaaacaaacctccactgagcgagagaaagggagactctgatgagagacgtaggagccatcaggctgtaaataaataaaaagcacctggctgggcgccagcatacacgtctctgtctctgctatgacccaattcagggattctccctgagaggaggttttgagcctctgattttataatttgggtttctatgaagctggatgtcttgcctgtgtactgataagtaatatagtctgtcatcttttgtcagctaggtagggattggagtttttgagaatggtttttcactccaaacagctcagaggacctgggaggggtggaaggtgcaccgagtgggctcttggaggtctgctcacacggcttcacagtgacttcacagggtctgcaggagctctcctgagtggaccccagagccctctgctaggaatggaggggagtggtttggtttgagggcttttgttttgttgttttcattactattttcttgatagaagggcgggggggagggggggtgttgccctttactctagttcttgcatttgaattgctaacatcctcttttcccttttttcttcctattttgatttggtttctcattgctcaatgtcttctcttcctgtctcctcctttctttctccctatttctgtttgtttgcctctgttttgctcaggtggcttcggtgctgctccagtgtttggcagccctcctacttttgggggatcccctgggtttggaggggtgccagcattcggttcagccccagcctttacaagccctctgggctcgacgggaggcaaagtgttcggagagggcactgcagctgccagcgcaggaggattcgggtaagccccctggggagggcccttgggaacccacacgccagccaaaaagcactaggggcctgtactcttgctctgaaaagaaatttgaccatgaggtgaaggcccctcccttgaaatttgtgaacaactccctcaaggattcctgtacctctccagggtaagactcatttcgttcaagccaggctttgttgaattcatggtggacctcagctgtgttgctgttccctggtatgagaaatgctggtcatcagagcccctgttctcctgctggggctaaaggaaggcaccagccctgccttaactactgctttgtagccaagaggtgccccggtgtggagcttctgttaggaagtcctcaatgaatggttttcaccagattctttcctcttgggattattctgtgttagacccgttgtccttgaacaaacaactccctgtgtcccctgctcccctgcagccccccagagtgagtattcagttgcacaggtcctcccgtgggaagatcctggatgatcagggatttcgaagctgctctcattgcctcgtgtgcgtctgcactggaaaaggccatttttagggagtcgcttttaagggcagaatttcagtgtggttgccaaaaccccaagggaaaaaaaccttcaccacaccacaacatcccaatttaaaaaatgtacacgggatgactaccaagtctcttgttcaaaggaggtgtcgatgcctgaaaggagttctaaaacgcctcttgccgcagtactgggctcagcatgagctgaaggtttgggggaggggagatgattttgtctaggggaattgttgagatacttggatctgagtcttggcaagatgacagcatctttatcttgaaaataaactatagtatgttcttactcacacccttcccctccgtgcaagatgctggagcgcagcagcaggagtgagagggttggcgtgctgcttctcctgtttcacgggagactgatgccttaggtttgccctcaggaaaccccaagaattaaagttaaggaaagctttgaaaggacagttagagacccacttaggctggtattctcagaggtcttaatggatgctgttctctgcagtgatgaaccagcacacagtaccacagagttggtagaaggtttgggttggctgggtatcttgtgaattgatttatttatttgaaaccagctgttttctttactagtagaaaagtatattctgccttggggcggctctcacacaaatcccgattggctggttagtcagtcctaaaaaaggttaatgccaggtcagttattaaatctccataagagcccattaccttcttccaggtccctggccatgagcctgtctccgaccctgaagggcaggctgttgctgatgaggcccaaggcaggaggaggaagggagcaggccgctcctgggagaaagtccaatgagagcagatcccttggccacctttgtatggaaagagccttgacctcaccattaaaagtgaatagaatggtgggaaggcagagttttagatactttttcttgctttggggttgattcttgcccccaggtgctgccccttctcccagaaaccactgatccgtttccctcacctagtcacctccagaccccagaagctctccccaacccagccgagttcctctgcaaacaattcaaggggctctgataggtcacacagtgccaccttgtgtgctggaccatatctggagggagaactgagtgagggggcacaggggattgtctccaggtggggcgagcaggggaaggaaaatagtggccacttttacattggtttgggtagtaattattgattcaggaagcaaatacaaaatcctgaatgaaatgacttggaaaaagtaaatagaatcaagatcccaagaggagctgaagataaataaatgggagcaggatgtgggggaatggtcggtaagtgagaaatgctaaaatgatagaataaagcttaaggattgttggaggtagagcaggaactgtgtactgcatagttcccaaatgccctggtgttccaatgggggatggaaactaaaacactggccaggttggatttcatactgtagtcctgccatttttcttcctagagcagagataaaagttggccctgggcgatagctcattctctctgaaaggctgctagttaggcccagcctgtcaccctggatcatgagtgtcgtgtgtattgggacttacggcagggggctgaggcttgcagatgggcaagtggtgagaggccccactgacctcagtctgtttctcactggagcgcaggtttgggagcagcagcaacaccacatccttcggcacgctcgcgagtcagaatgcccccactttcggatcactgtcccaacagacttctggttttgggacccagagtagcggattctctggttttggatcaggcacaggaggtaagctgccacaagttctcccctcacaagcaaaatgggtccctcttgccttctcccccaaagaaatgagtatgttttacctgaccagtctgtttagtattttaaaagctgactgggcacgtggttcacgcctgtaatcccagcactttgggagaccaaggcaggaggatcacttgagcccaggagtttgagactagcctgggcaacatggcaagactccattctctacaaaaaatgttaaaattcgccagacatggtggcacacacctgtggtcccagctactcgggaggctgaagcaggaggatcacttgagcgctgcagtgagctgtgattgcaccactgcactccagcctgggtgacagaatgagaccctgtctcaaaataaataaatatgtaacatactgaaagtggttgaaacatatatatatatatatatttttgagacggagtctcgctctgttgcccaggatggagtgcagtggcacaatctcggctcactataaactccgcctcccgggttcacgccattctcctgcctcagcctttgagtagctgggtctacaggcgcccgccaccaggcccggctaattttttgtgtttttagtagagatggggtttcactgtgttagccaggatggtctccatctcctgacctcatgatccacccacctcggcctcccagagtgctgggattacagcacctggcatatatatttttttttaggttttagttagacttagaacactgtgtcatttcttaccaaagaaattactgtcttgatttcctctcaggatttgagaagcccaaaataataatggtcttactaggccttggtttaaaaaatctaagccagcagactcaaaaaaaaaaaaaaaggcatagaaacttcacaaaacatcttgcatttgtttaacactctgcttcttcagatggcagaatatgtgtcttccattttgttcttgcagtaaactgacaaggcacagaatttaggtatcattacaattgtacccgtgaagaaacagaaactccaaggaactaagtgttagcagttagcagtagaaccaggcctagaatccagccatcttgcttctctggcccccaaaaagaagaggaagcaaatggatggaaaaacaacaacagcaaaaaaaaaaaaaaaaaaaaaaggttttcctaatgaatggatctatgtggtccagtacagctgagaggccaagccagagaccctctgcctacagctggggccgaggagggaggaagaaccctaaaataccaagaagataactcataaaaagtaaaggattttttctgccttctgggggatctgagtagctccagaggacaaactcagaataaaggggcttctgtgtgtacctttcctgccttcctgtaggtggtggaggcacggagggcttcccacaagaagcacagaggagggcagacacttagcatggggaccacctttgtctttcgagtggatgcgtgctttaacttcactcttattctgcttttcagggttcagctttgggtcaaataactcgtaagtatccccctttttgagtctcaccttaattaaaagcattaaataaggttggaagtgtgtggatcttgctggatttgtgcattttcttttcgttttttcctgtttttagagtttgtcctggaagtgtgggggttcagcagcagggtttgggttttgtggacttgctcttctctgtagcaatatggcaggaggtgccaggcctcgccttcttaagaggcgtggttcaaagagaaaagagcacgcctgccagtgagctgggcctgagggcagcgctgaggagatgctgctcctgacttccctggaggtttctcagaagctgcatgctaacccctgggctctgggccatcaccaggtctcatgtgttgatccaccctctgtgcttctgtgtaaaatttcatggcgttaaaattcagtcttagccaggtgggtggttcacgcctataatcccagcactttgggaggctgaggtgggaggattgcttgagcccaggagtcaagaccagcctgggcaacagagtgagaccccatctctactaaaaattaaaaaaattagccgtgcatgctggcttatgcctgtggtcccagctactccagaagctgaggcgggaggatcacttgagcctgggaggttgaggctgcagtgagccaagatggtaccactaccgtctagcctgggtgacagccagaccctatatcaaaagaaaaaaaaatatatactggccaagcacggtggctcacacctgtaatcccagcactttggcaggccaaggtgggcagatatttgaggtcaggagttcgagaccagcctggccaacatggtgaaaccccatctctactaaaaatatatatatatacatatatagataaacacacaagaattagccaggcgtggtggtgcatgcctgtaatcccagccactgaggctgaggcaaaagaagcacttgagcccgagagacagaggttgcagtgagctgagatcacgccactgcactccagcctgggcaatagagtgagactctgtatcaaaaaaataataataaaaaatctgagtcctgacctttgcacacaggcagagcagcagagcctgtgactgctctgtgacagagcagctgactccaccactgtcctgtgcttccttgcaggtctgtccagggttttggtggctggcgaagctgagggcgtgtcagcaggcctttcgatccctgggaccaaccgcatcctcagcttcttccccgagaaatgctggagcaggctgttcagaccgacgttgccatcaaaacacatacacccagaaagaaacaacagaaaccaaaactcacaaggcgcatgattacttgttttatatttcatgttgggttttccctcccactattaaacagtctgtttccgtacagaacgtatgtgggttttttcagatcacagccaagaagattgccccgtttctgtggctctgagaagccagcagagcctccatcagccagaacactgtgtcttcaaggatggcatcagaagtcaccagcgtcgggtgttgataaacagcatcgaatgtgccgtggtctcacttggacctagcgccctccacatagggaagaggttgaatgctggtgggtcatctttttgaggctgaaacttggttatctcctctccttgttcttttagccattgtgtatcaggaccatccaaggacgcactctgcgattgagtggaggcagaggaagccactcatgccagcagcagttgagtttcagaagcagccatagcgcttttcagtacagtacaatagtagccagcgtgaggcaggacagtgctgcgccttagccggccttggctctcatctccatgtggctcttgggtgccatgtgtcctactccagagaggagggggccggtcacttgagaagacagcctttatattctgtatgtggcagtgacattggtagccacacctacccagtgtctactaaccacagtgcagatagcccttgggtagacccaggaagtgtgaagacagacactgctgttgccagacaacactagcagaacgatgctggatttgacaacagtgtttgctaggacggcccagagctcatcactgcagttttattagagtgcttctttatctttaatgcagtatctttgaggcctgtaacatcctagatagttgccatcaaacaaggaccgtctcgcattgaaaacagatgtaagaatttctctttcaggcccagaatctgacagtgctttggcttgggtcatgagcagcggggagttgggaagagatttttttttttagagttttacatattggcaggttgtatttttttaatgttttaataaaagtttgacatgacattaattcatcatgttgcagacagtgtgacctccttggttctgatggcttatgtggggacagtagaccatggtgaggtctccactgtgtcaccacctggtctgaaggtccccatctcgcctgtgccccagggtcacctgcagagttctttgtcaagtgcacattcccagcctccatcctggggactctggctccagaggactccgatagaggctggacgcccacctggctttgtgtttggtgatttcttaagctcacgagaagaggaatctcattgtatagcactgttgggtttcagaaatccctccctcaaccagatgccagcagagccaagagctggaattagatccgtggtgtctctggatgactgtcaccctgcgctctgtgcagttaggagagggaggggctgtctgtacggtccgttatctaggggctctgcctctcgcaaagagctggggtctccataaatttaatgtgtgctctttttggtccttgagaattgaagagcctgtcacctccaccctgtgttcacaggtgaagtggggggacagtccccatgacattcacaaccagtcacagggcatctttctcccacgtgggctcgtgctagtctagagacaaagggactcaagctctgacaggagaggctcgtggcggagggcttagctttaaagggagagatgtacctgaagctctgcaggctccgttctgcccttggctgtcatcctgccgactggcacccaggccgagccagtcttctcctacccttttgcttccccctggacactcctttttataaatagaaatggttcggcctaaacccttgacctcaaattctctgcgttgatcctccattgaggtggcatgtgacatctctccataaggcactatcagctgtgctcaggcagataacacccccactccctgtcaggcagcagccccggaggaatgtactactggcatgtgagcccctccaagttccttttttgggggtgattacagcggtagatggcaggggtcagctcagcctgcatcccctgacgcctgaactgtcaggatatccggctggaatgcacagtcgctcccacctgcccagggaggagatggcggggcttgagccatctccaaatcggggcaggcaaagagcctggatgacaagaaggggccccagggatgcccacgcagcccttctggggcatgtgctgcagcggcaggcacaggaggtttcatttatgtttctgctccgcgtaactcaggaaagggggcgcagactgagctaggctgtgttttgcttggcttttccagacacacatatcacactggtaattggtgcttcagatggcaacatagggatagaggccaaattgagctcctcagggacaggtagaaccccagttacacgacacccacaatcccggcctctcgtttgggcaaaagtatgagtcctgtggcacggtgatgtggctgagccggtggtcccctccacatggccctgcccacctgtgagtgtcctggtgcctgctttcagctttgcgttctctgtggcagcctccagagaggcttctaggtcaggtctctggcattacagagaaggagtggactgtgcaggctgccctcactcttacccccaccagctctgtaaccagaacgaggcacttggcctctgtgtcttgagagtttttcccctcagttgtaaagtagaattcgaatacctgtctggcagggtggcggttcggactaaatgaggtgcacctggcccaaagctgcttcccagtcttggcgatgctgttacgctcacccgcaggctctggcctgacatctgggttaaatgatcccaagttggttcccactttgacctcatctggtctgtggggtggggacatctcctgcctggccttcaggccccttatcaaacacaggaccctgctgctggggaatggtgcggctctagtgcggcgctcaggctttcgctggagatttttcatcagggctaggctaggcccttgaatctgtgtttttcctaaagtgggtgattcttgtacagatggtccatgaaccccatgggccttctgctttaatctaaggacagtagccataaatacccacccagggggcatctgaaaaacagaacccagctcccatgaacatgtttattttgcagttaatccaggctaagggattttatctgaaattgttgataagaaacacaagtgtaaatttaagccgctctggcacctgctcaaaaaagaaaaactctaaaagcacaagtgggccaagtcacctccttgccactcaaaacactttgaaccctcctctgtgagtccctgtaacagaggaggaaagaccttccttgccctcatcctgccttgcagcagctcaccccacttggcttctggactgccacttagttgtttattctatttttttttttttttaagacggagtcttgctctgtcaccaggctggagtgcagtggcacaatctcggctcgctgcaacctccgcctcccaggttcaagggattctcctgcctcagcctcccgagtagctgggactacaggcgtgcaccaccacgcctggctaatttttgtatttttagtagagacggggttttaccgtgttagccaggatggtcctgaactcctggactcaagccatccgccctccttggctcccaaagtgccgggattacaggcatgagccagtgcacctggccccatttgtaatttctcttagaagacctgtccagtacttctcggcatttgattttcagccaacaaaactggcccagtttcatgccagagatggggcttcttgcctgaacttcctctgaggaagtccgtggagcaccctggctggaaggcagggatagtggatctcccagcctgggctgccagctggtcggattcctgcgtgtgcacccccattgctctgtctcaacatcactctctactttcctcctggggaaaggaggaggagcaattggatggagggtgtatcaacccccaaacttctgccgttttcaaaatgtctcctatgggaagttagtattctataaaaaaaaaaaaaggtggggggggctctatggccatataagtttaggaagagtggatggaacaaaatttaacatctttttattataaaaaagacctttttgagcctttaatatgcaaatatgttttgtaaatcaacaagaggaaacagtccgccatttcccaaatacgtttgctcggaacctttctccttggagttggggtccttggcactcaggctgggaaccgctgcctcgttgatgttgctatacggaagcacagctcacttcctgctggttgtgtttctaacacacattcctttttaaaaattgctttgtaatagtaacaactcactggatggctacagcatgccagcactgactatgctaagcccttcactgacattttcacatttcaccctgtgagccacgtactacaacccacagctttcagatgagaaaatgaggctgagccaggaagcggtttgcccaagtctcacaagagaatgaggggcggagccagcactggggcccgggcagtgtctccctcccgctcctgccaggccctggctggctaccattggatctcctgattcttctccaagatacctgttcatttccaaagaaatcttgccggctggtgccagcaacactgctgaaccccttaccgaccagcagaccaccctgtgaaaacaagccggccttgacatcagtcacagcaaataaccctgacaccacgcagttacctgtcccctctgctgcctctcacctgtttgtatctgtgatcacgatctgtctacaacggcagcccggcgggggctgggcagaggccgggcctgtctagcttatgttggcgtgaaccgcacatggacaggggtttgcgggtcctgacgaggactccagggtgggagcagctggctccatacccttcagctgtgtcatctgcccttcctctgccgtctcctctggggtctggctttgaggcttgccagagtcccaccagaggtcaggccacaggcccactgaggtggcagttgctgcattgttataaatagaagcccatccataccgcagccccggccggccggagattctctgcattgttttcagacctagattgccagctgcagaggccacaggcaggggtggggggagcgagtgggctgtggatggaaggcgggagccccagcatatgagacaagagccgagcccggtcctggctagaggcgacctctccttgctggcgtcctggcccgtgagggtacagaagcagctttgctttgtggcccatcggatgttggctttctcgacctcacctagtgcctttccatctggaagcctagaagggggcttggctgccatgcagccctcacagtgcctgcaggccctcctgtctggccctcctccccctcctgcccccttccgcatctaactctccctgcggttctccaggcccctctgcactttctctgcttctcaaatggcccattctcctcgtcgccacaggaccgctccatcctctgtcccttcctgctcatcctgcaggtctccatttaagcgccacctccccacggcagagccttcctggtgggctgacctgctcacaggcactggctccctttgtgtgctcctgccctgccgcactgctattttgaggcctccgtcgcaattgaaatttctcgtgtagtcggtggtttcattcatttatctagtccgtcccagcaacgggcagctctgtgagggcagtgccaggacagagcaagagtcaggaactgttgataaatgactcccagcacgacttcctagaaagaagccaagacttgttcaaaagccagacccccacctgagatgacaagagatagcaggtattcagacagttcaagggcacagggccagctaatggcaccagaggcacacagcaaggccagggctcccccaccctgcccaggggtcctctgggtctcatcccaggaacgcactagggcagggcagccaggtgagtggtgaagagtgcagactgggtgcaggaggccctggggaggaggccttcctctgagacaccagctggagcaagccgtcccatctgccccccgtgaaaatgaggcaggtgccgtgtgcctcacagggcagggcttgcacggggctcagggcagcgcctggcagagtcactggggtgctcacggtggcttccctgccttctcagggagagacccaggccccagcagacggaccccagtgccccacgaagtcttccctgatcccacagctgaccggcagcactcacttcaggaatggggctcggggacccgcaaaggtccagcctgggtgacagagtgagactctgccaaaaaaaaaaaaaaaaaatcaagacagtagacatcagacaaggaaggacagtgatccccaagattcaagaaactaatgaatgagccatatgattgccccagttaccgcctggagagtgtgtccagatcacagtgcatggaaggagagcccaagaggagcccgacagtctcccggagtttacaaagcagaggactggggaggagagggcctcacacagagagaactctggacccttgcggagggtcctctcgagtattcaactgagtactgctcagcttggtacatgtgaggaaatcccgggtctagagaaggaaaacaacatgagaggattagaggcaaactcttcagaactctagggcgaagaatagtgcctcttcctgccggccgaagtggaaagcctcataaatcacttcgcattggaaacagtgctcagaaacgttttgtctcggtgctgggagaatatgagtcctacccagaatgccacttggatctcacctaacaacgcttaaaagcaagacccaaacaaatcaaactatttccaagtaagagcccagaacaaagcccaagaagcgcataggaatacaaaagcacccggtaacgggcggctgtcaaaggtagcagaggggcaggccctggtacgcagtggctgaggccatctcctgggccacctgtggctatcacagccaaacaggtactgctggaccaagaggtggtggtcctgggtggcaagggcatcagcgtttctggcaatttctacagaaacaagtgaaagtgcctgcccttcccctgcaagtggatgaacgccaacctatcctgcgccccctaccacttccaggcccccagccacatctttaggcagactgtgtggggcatgctgccccgaagactaagtgaggcctgccgggcacagtggctcacgcctgtaatcccagaacttttggaagctgaggcaggtggatcacctgaggtcaggtgttcaagaccagcattggccaagctgttgaaccctcatctctactaaaaatacaaaaattagccaggcgtggtagcaggtgcctgtaatcccagctactcaggaggctgaggcaggagaatcgcttaaacccaggaggaggacgttgcagcaaaccgaaatcgcaccactgcactccagcctgggcaacagagcaagatgccatctcggaaaaaaaaaaccaaaaacagactggccaggcacagtggctcatgcctgtaatcccagcactttgggaggccaaggcaggcagattacgaagtcaggagtttgagaccactgcactccagcctgggcaacaagagcgaaactctgtctcaaaaaaaaatttaaatttaaatttaaaaagacttaagtgaggccaggctgccctgaccacctccaagtatctggtgggatcccaccaccctatgacaagaaaaagcagagggtggttcccgctgccattaagactgtgtttcacgcctctgagaaagtctgcccacctggggcgcctggctcacaaggttgcctggaagtaccaggtggtgacagccaccctggagaagaggaagaaggtcaaaatccactaccagaagaagaaacagctcatgagcctacagaaacaggctaagggcaggcatggtggctcatgcctgtaatccccgcactttgggaggttgaggtgggcggatcacttgaggtcaggagttcaagaccagcctggccaacatggtgaaaccccgtctctactaaaaatacaaaaattagctaggtgttgtagcatgtgcctgtagtcccagctactagggaggctgaggcaggagaattgcttgaacccgggaggtggaggttgcagtgagccaagatcgtgccactgcacactccagcctgggccacagaacgaggctgaatctgaaaaaaaaaaaaaaaaaaaaaaaccagaacaaaaaagtcctgcttgggcggggtgcaatagctcacccctataatcctcgcactttgggaggctgaggcaggaggatcatttgagtccaggagttcaagaccagcctgggcaacatagggaaaccctgtctctacaaaaaaaaaaaaaaaaaaaatcaaaaaattagctgggcatggtggcatgtgcctgtagtcccagctactcaggagactgaggtaggaggatcacttgagcccaggaggtcaaggctgcagtgagctgtgatggcattactgtattccagcctgggcaccagagggaaaccttgtctcaaaaaataataataataaatataaacttcccacttagtcatatactatatctgcagatgttagaatgtgagaaagtggctgggcacagtggctcacacctgtaatctcagcattttgggaggccaaggtgggcagatcacctgaggtcaggagttcaagaccagcctggctaatatggtgaaaccccgtttctactaaaaatacaaaaaattagccaggcgtgcaaagaagcaaagaaatataatctataatgggtaaactcaaacaattgagatgggccccgaaatgactcagattaaaaaattcgcagtcagggccgggcgcggtggctcatgcctgtaatcccagcactttgggaggccgaggagggcagatcatgaggtcaggagatcgagaccatcctggctaacacggtgaaaccccgtctctactaaaaatataaaaaattagccgggcgtggtggcgggcgcctgtagtcccagctactcgggaagctgaggcaggagaatggcgtaaacccgggaggcggaggttgcagtgagccgatatcgcaccactgcactccagcctaggcgacagagcgagactccgtctcaaaaaaaaaaaaaaaattcgcagtcagaaactttaaaaccatgatcacaactgtactctgtatttccaagaagctagaggaaagattaaacctgttgaatagaggcatagaagagatacaaaagatcccagctgaacttgtagagatgaaaattatggtatctgagaaacaccggggagggattaataggctattatccacaacagaggaaaagatgagtgaacttgacttgaagacatagccatagaaactacccaaaatgaactacacacggagataagaatgaacaaattcggaacagatcatcagtaaatggtgggacaactttgagtggcctaatatatgtgtaattggagtccctgaaaaaaagatggggagaaaaatacaaaaagatcagaaatggtaactacatgagtaaatgtaaagattggggtgtaggggcttttctaaatctctttaaaagaactgcttaggccaggcacggtggctcacacctgtaatcccagcactttgggaggccgaggggggcagatcacgaggtcaggagatcgagaccatgagaccatcctggctaacacggtgaaaccctgtctctactaaaaatacaaaaaattagccgggcgtggtggcgggtgcctgtagtctcagctactcgggaggctgaggcaggagaatggcatgaaatcaggaggcggagcttgcagtgagccgagatcacgccactgcactctagcctgggtgacagagcgagactcgtctcaaaaataaataaataaataaaaaataactgtttaaagcaaaaataataacaatgtactatgggttttatgatatatgtggaaaaatgtagtatgacaacagctgggcacggtggctcacacctgtaatcccagcactttgggaggccgaggcgggcagatcatgaggtcaggagatcgagaccatcctggctaacacggtgaaaccccatctctactaaaaatacaaaaaaaattagctggatgtggtggcgggcacctgtagtcccagccactcgggaggctgaggtgggagaatggtgtgaacccgggaggtggagcttgcagtgagccaagattgtgccactgtactccagcctgggtgacagagtgagactctgtctcaaaaaaaaaaaaaaaaaaaaaagaattacaaggaggaatagatagatccatagttatagtcagaggtttcaacagccctgcatcaatctttttatttatttatttatttttttgagacagggtctcgctctgtcacccaggccggagtgcagtagcacactctcagctcaccgtaacctccgcctcctgggctcaagcaatcctcccacgtcagcctcccaagttgctgggactacaggagcacaccaccatgcctggctaatttttgcattttttgtagagaagggtgtttgctatgttgcccaggctggtcttgaactcctagactcaagcagccctcccacctcggcctcctaaagtgctgggattacaggcaggagtcattgaaccctaccctgtctcaataattgacaacacaaatagacagaaaataagtcagaatatagaagacttgaacaacactatcaacacactttgaacctaattaacatttgtagaacactccacccaacatcagtagaatatgtgttcttttcaagtgcatacaaataggaagaccatattctaagtcataaaatgtgggcggcaagccacccaggtgccgaggcaagagaccgaggacacgagctgttgcagtataataaaatat

SEQ ID NO: 1174 - DNA, 7264 bp, Homo sapiens
cgcgccggaaatgcgaggtcaactgcgcgccgctggcgctgaggggaggaagtttgctgtcgagcggcctgggttccgtgggcaaggccgtgggaggcagcgttggctgcttcgacacactgagggcggcgcgatgggagacgagatggatgccatgattcccgagcgggagatgaaggattttcagtttagagcgctaaagaaggtgagaatctttgactcccctgaggaattgcccaaggaacgctcgagtctgcttgctgtgtccaacaaatatggtctggtcttcgctggtggagccagtggcttgcagatttttcctactaaaaatcttcttattcaaaataaacccggagatgatcccaacaaaatagttgataaagtccaaggcttgctagttcctatgaaattcccaatccatcacctggccttgagctgtgataacctcacactctctgcgtgcatgatgtccagtgaatatggttccattattgctttttttgatgttcgcacattctcaaatgaggctaaacagcaaaaacgcccatttgcctatcataagcttttgaaagatgcaggaggcatggtgattgatatgaagtggaaccccactgtcccctccatggtggcagtttgtctggctgatggtagtattgctgtcctgcaagtcacggaaacagtgaaagtatgtgcaactcttccttccacggtagcagtaacctctgtgtgctggagccccaaaggaaagcagctggcagtgggaaaacagaatggaactgtggtccagtatcttcctactttgcaggaaaaaaaagtcattccttgtcctccgttttatgagtcagatcatcctgtcagagttctggatgtgctgtggattggtacctacgtcttcgccatagtgtatgctgctgcagatgggaccctggaaacgtctccagatgtggtgatggctctactaccgaaaaaagaagaaaagcacccagagatatttgtgaactttatggagccctgttatggcagctgcacggagagacagcatcattactacctcagttacattgaggaatgggatttagtgctggcagcatctgcggcttcaacagaagttagtatccttgctcgacaaagtgatcagattaattgggaatcttggctactggaggattctagtcgagctgaattgcctgtgacagacaagagtgatgactccttgcccatgggagttgtcgtagactatacaaaccaagtggaaatcaccatcagtgatgaaaagactcttcctcctgctccagttctcatgttactttcaacagatggtgtgctttgtccattttatatgattaatcaaaatcctggggttaagtctctcatcaaaacaccagagcgactttcattagaaggagagcgacagcccaagtcaccaggaagtactcccactaccccaacctcctctcaagccccacagaaactggatgcttctgcagctgcagcccctgcctctctgccaccttcatcacctgctgctcccattgccactttttctttgcttcctgctggtggagcccccactgtgttctcctttggttcttcatctttgaagtcatctgctacggtcactggggagcccccttcatattccagtggctccgacagctccaaagcagccccaggccctggcccatcaaccttctcttttgttcccccttctaaagcctccctagcccccacccctgcagcgtctcctgtggctccatcagctgcttcattctcctttggatcatctggttttaagcctaccctggaaagcacaccagtgccaagtgtgtctgctccaaatatagcaatgaagtcctccttcccaccctcaacctctgctgtcaaagtcaaccttagtgaaaatagctcccagagcgcacccccgatgtcgccattctcttctgcctccaagccagctgcttctggaccactcagccaccccacacctctctcagcaccacctagttccgtgccattgaagtcctcagtcttgccctcaccatcaggacgatctgctcagggcagttcaagcccagtgccctcaatggtacagaaatcacccaggataacccctccagcggcaaagccaggctctccccaggcaaagtcacttcagcctgctgttgcagaaaagcagggacatcagtggaaagattcagatcctgtaatggctggaattggggaggagattgcacactttcagaaggagttggaagagttaaaagcccgaacttccaaagcctgtttccaagtgggcacttctgaggagatgaagatgctgcgaacagaatcagatgacttgcatacctttcttttggagattaaagagaccacagagtcgcttcatggagatataagtagcctgaaaacaactttacttgagggctttgctggtgttgaggaagccagagaacaaaatgaaagaaatcgtgactctggttatctgcatttgctttataaaagaccactggatcccaagagtgaagctcagcttcaggaaattcggcgccttcatcagtatgtgaaatttgctgtccaagatgtgaatgatgttctagacttggagtgggatcagcatctggaacaaaagaaaaaacaaaggcacctgcttgtgccagagcgagagacactgtttaacaccctagccaacaatcgggaaatcatcaaccaacagaggaagaggctgaatcacctggtggatagtcttcagcagctccgcctttacaaacagacttccctgtggagcctgtcctcggctgttccttcccagagcagcattcacagttttgacagtgacctggaaagcctgtgcaatgctttgttgaaaaccaccatagaatctcacaccaaatccttgcccaaagtaccagccaaactgtcccccatgaaacaggcacaactgagaaacttcttggccaagaggaagaccccaccagtgagatccactgctccagccagcctgtctcgatcagcctttctgtctcagagatattatgaagacttggatgaagtcagctcaacgtcatctgtctcccagtctctggagagtgaagatgcacggacgtcctgtaaagatgacgaggcagtggttcaggcccctcggcacgcccccgtggttcgcactccttccatccagcccagtctcttgccccatgcagcaccttttgctaaatctcacctggttcatggttcttcacctggtgtgatgggaacttcagtggctacatctgctagcaaaattattcctcaaggggccgatagcacaatgcttgccacgaaaaccgtgaaacatggtgcacctagtccttcccaccccatctcagccccgcaggcagctgccgcagcagcactcaggcggcagatggccagtcaggcaccagctgtaaacactttgactgaatcaacgttgaagaatgtccctcaagtggtaaatgtgcaggaattgaagaataaccctgcaaccccttctacagccatgggttcttcagtgccctactccacagccaaaacacctcacccagtgttgaccccagtggctgctaaccaagccaagcaggggtctctaataaattcccttaagccatctgggcctacaccagcatccggtcagttatcatctggtgacaaagcttcagggacagccaagatagaaacagctgtgacttcaaccccatctgcttctgggcagttcagcaagcctttctcattttctccatcagggactggctttaattttgggataatcacaccaacaccgtcttctaatttcactgctgcacaaggggcaacaccctccactaaagagtcaagccagccggacgcattctcatctggtgggggaagcaaaccttcttatgaggccattcctgaaagctcacctccctcaggaatcacatccgcatcaaacaccaccccaggagaacctgccgcatctagcagcagacctgtggcaccttctggaactgctctttccaccacctctagtaagctggaaaccccaccgtccaagctgggagagcttctgtttccaagttctttggctggagagactctgggaagtttttcaggactgcgggttggccaagcagatgattctacaaaaccaaccaataaggcttcatccacaagcctaactagtacccagccaaccaagacgtcaggcgtgccctcagggtttaattttactgcccccccggtgttagggaagcacacggagccccctgtgacatcctctgcaaccaccacctcagtagcaccaccagcagccaccagcacttcctcaactgccgtttttggcagtctgccagtcaccagtgcaggatcctctggggtcatcagttttggtgggacatctctaagtgctggcaagactagtttttcatttggaagccaacagaccaatagcacagtgcccccatctgccccaccaccaactacagctgccactccccttccaacatcattccccacattgtcatttggtagcctcctgagttcagcaactaccccctccctgcctatgtccgctggcagaagcacagaagaggccacttcatcagctttgcctgagaagccaggtgacagtgaggtctcagcatcagcagcctcacttctagaggagcaacagtcagcccagcttccccaggctcctccgcaaacttctgactctgttaaaaaagaacctgttcttgcccagcctgcagtcagcaactctggcactgcagcatctagtactagtcttgtagcactttctgcagaggctaccccagccaccacgggggtccctgatgccaggacggaggcagtaccacctgcttcctccttttctgtgcctgggcagactgctgtcacagcagctgctatctcaagtgcaggccctgtggccgtcgaaacatcaagtacccccatagcctccagcaccacgtccattgttgctcccggcccatctgcagaggcagcagcatttggtaccgtcacttctggctcatccgtctttgctcagcctcctgctgccagttctagctcagctttcaaccagctcaccaacaacacagccactgccccctctgccacgcccgtgtttgggcaagtggcagccagcaccgcaccaagtctgtttgggcagcagactggtagcacagccagcacagcagctgccacaccacaggtcagcagctcagggtttagcagcccagcttttggtaccacagccccaggggtctttggacagacaaccttcgggcaggcctcagtctttgggcagtcggcgagcagtgctgcaagtgtcttttccttcagtcagcctgggttcagttccgtgcctgccttcggtcagcctgcttcctccactcccacatccaccagtggaagtgtctttggtgccgcctcaagtaccagtagctccagttccttctcatttggacagtcttctcccaacacaggaggggggctgtttggccaaagcaacgctcctgcttttgggcagagtcctggctttggacagggaggctctgtctttggtggtacctcagctgccaccacaacagcagcaacctctgggttcagcttttgccaagcttcaggttttgggtctagtaatactggttctgtgtttggtcaagcagccagtactggtggaatagtctttggccagcaatcatcctcttccagtggtagcgtgtttgggtctggaaacactggaagagggggaggtttcttcagtggccttggaggaaaacccagtcaggatgcagccaacaaaaacccattcagctcggccagtgggggctttggatccacagctacctcaaatacctctaacctatttggaaacagtggggccaagacatttggtggatttgccagctcgtcgtttggagagcagaaacccactggcactttcagctctggaggaggaagtgtggcatcccaaggctttgggttttcctctccaaacaaaacaggtggcttcggtgctgctccagtgtttggcagccctcctacttttgggggatcccctgggtttggaggggtgccagcattcggttcagccccagcctttacaagccctctgggctcgacgggaggcaaagtgttcggagagggcactgcagctgccagcgcaggaggattcgggtccctggccatgagcctgtctccgaccctgaagggcaggctgttgctgatgaggcccaaggcaggaggaggaagggagcaggccgctcctgggagaaagtccaatgagagcagatcccttggccacctttgtatggaaagagccttgacctcaccattaaaagtttgggagcagcagcaacaccacatccttcggcacgctcgcgagtcagaatgcccccactttcggatcactgtcccaacagacttctggttttgggacccagagtagcggattctctggttttggatcaggcacaggagggttcagctttgggtcaaataactcgtctgtccagggttttggtggctggcgaagctgagggcgtgtcagcaggctgttcagaccgacgttgccatcaaaacacatacacccagaaagaaacaacagaaaccaaaactcacaaggcgcatgattacttgttttatatttcatgttgggttttccctcccactattaaacagtctgtttccgtacagaacgtatgtgggttttttcagatcacagccaagaagattgccccgtttctgtggctctgagaagccagcagagcctccatcagccagaacactgtgtcttcaaggatggcatcagaagtcaccagcgtcgggtgttgataaacagcatcgaatgtgccgtggtctcacttggacctagcgccctccacatagggaagaggttgaatgctggtgggtcatctttttgaggctgaaacttggttatctcctctccttgttcttttagccattgtgtatcaggaccatccaaggacgcactctgcgattgagtggaggcagaggaagccactcatgccagcagcagttgagtttcagaagcagccatagcgcttttcagtacagtacaatagtagccagcgtgaggcaggacagtgctgcgccttagccggccttggctctcatctccatgtggctcttgggtgccatgtgtcctactccagagaggagggggccggtcacttgagaagacagcctttatattctgtatgtggcagtgacattggtagccacacctacccagtgtctactaacc

SEQ ID NO: 1175 - protein, 2138 aa, Homo sapiens
MRGQLRAAGAEGRKFAVERPGFRGQGRGRQRWLLRHTEGGAMGDEMDAMIPEREMKDFQFRALKKVRIFDSPEELPKERSSLLAVSNKYGLVFAGGASGLQIFPTKNLLIQNKPGDDPNKIVDKVQGLLVPMKFPIHHLALSCDNLTLSACMMSSEYGSIIAFFDVRTFSNEAKQQKRPFAYHKLLKDAGGMVIDMKWNPTVPSMVAVCLADGSIAVLQVTETVKVCATLPSTVAVTSVCWSPKGKQLAVGKQNGTVVQYLPTLQEKKVIPCPPFYESDHPVRVLDVLWIGTYVFAIVYAAADGTLETSPDVVMALLPKKEEKHPEIFVNFMEPCYGSCTERQHHYYLSYIEEWDLVLAASAASTEVSILARQSDQINWESWLLEDSSRAELPVTDKSDDSLPMGVVVDYTNQVEITISDEKTLPPAPVLMLLSTDGVLCPFYMINQNPGVKSLIKTPERLSLEGERQPKSPGSTPTTPTSSQAPQKLDASAAAAPASLPPSSPAAPIATFSLLPAGGAPTVFSFGSSSLKSSATVTGEPPSYSSGSDSSKAAPGPGPSTFSFVPPSKASLAPTPADVAPSAASFSFGSSGFKPTLESTPVPSVSAPNIAMKSSFPPSTSAVKVNLSENSSQSAPPMSPFSSASKPAASGPLSHPTPLSAPPSSVPLKSSVLPSPSGRSAQGSSSPVPSMVQKSPRITPPAAKPGSPQAKSLQPAVAEKQGHQWKDSDPVMAGIGEEIAHFQKELEELKARTSKACFQVGTSEEMKMLRTESDDLHTFLLEIKETTESLHGDISSLKTTLLEGFAGVEEAREQNERNRDSGYLHLLYKRPLDPKSEAQLQEIRRLHQYVKFAVQDVNDVLDLEWDQHLEQKKKQRHLLVPERETLFNTLANNREIINQQRKRLNHLVDSLQQLRLYKQTSLWSLSSAVPSQSSIHSFDSDLESLCNALLKTTIESHTKSLPKVPAKLSPMKQAQLRNFLAKRKTPPVRSTAPASLSRSAFLSQRYYEDLDEVSSTSSVSQSLESEDARTSCKDDEAVVQAPRHAPVVRTPSIQPSLLPHAAPFAKSHLVHGSSPGVMGTSVATSASKIIPQGADSTMLATKTVKHGAPSPSHPISAPQAAAAAALRRQMASQAPAVNTLTESTLKNVPQVVNVQELKNNPATPSTAMGSSVPYSTAKTPHPVLTPVAANQAKQGSLINSLKPSGPTPASGQLSSGDKASGTAKIETAVTSTPSASGQFSKPFSFSPSGTGFNFGIITPTPSSNFTAAQGATPSTKESSQPDAFSSGGGSKPSYEAIPESSPPSGITSNTTPGEPAASSSRPVAPSGTALSTTSSKLETPPSKLGELLFPSSLAGETLGSFSGLRVGQADDSTKPTNKASSTSLTSTQPTKTSGVPSGFNFTAPPVLGKHTEPPVTSSATTTSVAPPAATSTSSTAVFGSLPVTSAGSSGVISFGGTSLSAGKTSFSFGSQQTNSTVPPSAPPPTTAATPLPTSFPTLSFGSLLSSATTPSLPMSAGRSTEEATSSALPEKPGDSEVSASAASLLEEQQSAQLPQAPPQTSDSVKKEPVLAQPAVSNSGTAASSTSLVSAEATPATTGVPDARTEAVPPASSFSVPGQTAVTAAAISSAGPVAVETSSTPIASSTTSIVAPGPSAEAAAFGTVTSGSSVFAQPPAASSSSAFNQLTNNTATAPSATPVFGQVAASTAPSLFGQQTGSTASTAAATPQVSSSGFSSPAFGTTAPGVFGQTTFGQASVFGQSASSAASVFSFSQPGFSSVPAFGQPASSTPTSTSGSVFGAASSTSSSSSFSFGQSSPNTGGGLFGQSNAPAFGQSPGFGQGGSVFGGTSAATTTAATSGFSFCQASGFGSSNTGSVFGQAASTGGIVFGQQSSSSSGSVFGSGNTGRGGGFFSGLGGKPSQDAANKNPFSSASGGFGSTATSNTSNLFGNSGAKTFGGFASSSFGEQKPTGTFSSGGGSVASQGFGFSSPNKTGGFGAAPVFGSPPTFGGSPGFGGVPAFGSAPAFTSPLGSTGGKVFGEGTAAASAGGFGSLAMSLSPTLKGRLLLMRPKAGGGREQAAPGRKSNESRSLGHLCMERALTSPLKVWEQQQHHILRHARESECPHFRITVPTDFWFWDPE

SEQ ID NO: 1176 - DNA, 7134 bp, Homo sapiens
cgcgccggaaatgcgaggtcaactgcgcgccgctggcgctgaggggaggaagtttgctgtcgagcggcctgggttccgtgggcaaggccgtgggaggcagcgttggctgcttcgacacactgagggcggcgcgatgggagacgagatggatgccatgattcccgagcgggagatgaaggattttcagtttagagcgctaaagaaggtgagaatctttgactcccctgaggaattgcccaaggaacgctcgagtctgcttgctgtgtccaacaaatatggtctggtcttcgctggtggagccagtggcttgcagatttttcctactaaaaatcttcttattcaaaataaacccggagatgatcccaacaaaatagttgataaagtccaaggcttgctagttcctatgaaattcccaatccatcacctggccttgagctgtgataacctcacactctctgcgtgcatgatgtccagtgaatatggttccattattgctttttttgatgttcgcacattctcaaatgaggctaaacagcaaaaacgcccatttgcctatcataagcttttgaaagatgcaggaggcatggtgattgatatgaagtggaaccccactgtcccctccatggtggcagtttgtctggctgatggtagtattgctgtcctgcaagtcacggaaacagtgaaagtatgtgcaactcttccttccacggtagcagtaacctctgtgtgctggagccccaaaggaaagcagctggcagtgggaaaacagaatggaactgtggtccagtatcttcctactttgcaggaaaaaaaagtcattccttgtcctccgttttatgagtcagatcatcctgtcagagttctggatgtgctgtggattggtacctacgtcttcgccatagtgtatgctgctgcagatgggaccctggaaacgtctccagatgtggtgatggctctactaccgaaaaaagaagaaaagcacccagagatatttgtgaactttatggagccctgttatggcagctgcacggagagacagcatcattactacctcagttacattgaggaatgggatttagtgctggcagcatctgcggcttcaacagaagttagtatccttgctcgacaaagtgatcagattaattgggaatcttggctactggaggattctagtcgagctgaattgcctgtgacagacaagagtgatgactccttgcccatgggagttgtcgtagactatacaaaccaagtggaaatcaccatcagtgatgaaaagactcttcctcctgctccagttctcatgttactttcaacagatggtgtgctttgtccattttatatgattaatcaaaatcctggggttaagtctctcatcaaaacaccagagcgactttcattagaaggagagcgacagcccaagtcaccaggaagtactcccactaccccaacctcctctcaagccccacagaaactggatgcttctgcagctgcagcccctgcctctctgccaccttcatcacctgctgctcccattgccactttttctttgcttcctgctggtggagcccccactgtgttctcctttggttcttcatctttgaagtcatctgctacggtcactggggagcccccttcatattccagtggctccgacagctccaaagcagccccaggccctggcccatcaaccttctcttttgttcccccttctaaagcctccctagcccccacccctgcagcgtctcctgtggctccatcagctgcttcattctcctttggatcatctggttttaagcctaccctggaaagcacaccagtgccaagtgtgtctgctccaaatatagcaatgaagtcctccttcccaccctcaacctctgctgtcaaagtcaaccttagtgaaaagtttactgctgcagctacctctactcctgttagtagctcccagagcgcacccccgatgtcgccattctcttctgcctccaagccagctgcttctggaccactcagccaccccacacctctctcagcaccacctagttccgtgccattgaagtcctcagtcttgccctcaccatcaggacgatctgctcagggcagttcaagcccagtgccctcaatggtacagaaatcacccaggataacccctccagcggcaaagccaggctctccccaggcaaagtcacttcagcctgctgttgcagaaaagcagggacatcagtggaaagattcagatcctgtaatggctggaattggggaggagattgcacactttcagaaggagttggaagagttaaaagcccgaacttccaaagcctgtttccaagtgggcacttctgaggagatgaagatgctgcgaacagaatcagatgacttgcatacctttcttttggagattaaagagaccacagagtcgcttcatggagatataagtagcctgaaaacaactttacttgagggctttgctggtgttgaggaagccagagaacaaaatgaaagaaatcgtgactctggttatctgcatttgctttataaaagaccactggatcccaagagtgaagctcagcttcaggaaattcggcgccttcatcagtatgtgaaatttgctgtccaagatgtgaatgatgttctagacttggagtgggatcagcatctggaacaaaagaaaaaacaaaggcacctgcttgtgccagagcgagagacactgtttaacaccctagccaacaatcgggaaatcatcaaccaacagaggaagaggctgaatcacctggtggatagtcttcagcagctccgcctttacaaacagacttccctgtggagcctgtcctcggctgttccttcccagagcagcattcacagttttgacagtgacctggaaagcctgtgcaatgctttgttgaaaaccaccatagaatctcacaccaaatccttgcccaaagtaccagccaaactgtcccccatgaaacaggcacaactgagaaacttcttggccaagaggaagaccccaccagtgagatccactgctccagccagcctgtctcgatcagcctttctgtctcagagatattatgaagacttggatgaagtcagctcaacgtcatctgtctcccagtctctggagagtgaagatgcacggacgtcctgtaaagatgacgaggcagtggttcaggcccctcggcacgcccccgtggttcgcactccttccatccagcccagtctcttgccccatgcagcaccttttgctaaatctcacctggttcatggttcttcacctggtgtgatgggaacttcagtggctacatctgctagcaaaattattcctcaaggggccgatagcacaatgcttgccacgaaaaccgtgaaacatggtgcacctagtccttcccaccccatctcagccccgcaggcagctgccgcagcagcactcaggcggcagatggccagtcaggcaccagctgtaaacactttgactgaatcaacgttgaagaatgtccctcaagtggtaaatgtgcaggaattgaagaataaccctgcaaccccttctacagccatgggttcttcagtgccctactccacagccaaaacacctcacccagtgttgaccccagtggctgctaaccaagccaagcaggggtctctaataaattcccttaagccatctgggcctacaccagcatccggtcagttatcatctggtgacaaagcttcagggacagccaagatagaaacagctgtgacttcaaccccatctgcttctgggcagttcagcaagcctttctcattttctccatcagggactggctttaattttgggataatcacaccaacaccgtcttctaatttcactgctgcacaaggggcaacaccctccactaaagagtcaagccagccggacgcattctcatctggtgggggaagcaaaccttcttatgaggccattcctgaaagctcacctccctcaggaatcacatccgcatcaaacaccaccccaggagaacctgccgcatctagcagcagacctgtggcaccttctggaactgctctttccaccacctctagtaagctggaaaccccaccgtccaagctgggagagcttctgtttccaagttctttggctggagagactctgggaagtttttcaggactgcgggttggccaagcagatgattctacaaaaccaaccaataaggcttcatccacaagcctaactagtacccagccaaccaagacgtcaggcgtgccctcagggtttaattttactgcccccccggtgttagggaagcacacggagccccctgtgacatcctctgcaaccaccacctcagtagcaccaccagcagccaccagcacttcctcaactgccgtttttggcagtctgccagtcaccagtgcaggatcctctggggtcatcagttttggtgggacatctctaagtgctggcaagactagtttttcatttggaagccaacagaccaatagcacagtgcccccatctgccccaccaccaactacagctgccactccccttccaacatcattccccacattgtcatttggtagcctcctgagttcagcaactaccccctccctgcctatgtccgctggcagaagcacagaagaggccacttcatcagctttgcctgagaagccaggtgacagtgaggtctcagcatcagcagcctcacttctagaggagcaacagtcagcccagcttccccaggctcctccgcaaacttctgactctgttaaaaaagaacctgttcttgcccagcctgcagtcagcaactctggcactgcagcatctagtactagtcttgtagcactttctgcagaggctaccccagccaccacgggggtccctgatgccaggacggaggcagtaccacctgcttcctccttttctgtgcctgggcagactgctgtcacagcagctgctatctcaagtgcaggccctgtggccgtcgaaacatcaagtacccccatagcctccagcaccacgtccattgttgctcccggcccatctgcagaggcagcagcatttggtaccgtcacttctggctcatccgtctttgctcagcctcctgctgccagttctagctcagctttcaaccagctcaccaacaacacagccactgccccctctgccacgcccgtgtttgggcaagtggcagccagcaccgcaccaagtctgtttgggcagcagactggtagcacagccagcacagcagctgccacaccacaggtcagcagctcagggtttagcagcccagcttttggtaccacagccccaggggtctttggacagacaaccttcgggcaggcctcagtctttgggcagtcggcgagcagtgctgcaagtgtcttttccttcagtcagcctgggttcagttccgtgcctgccttcggtcagcctgcttcctccactcccacatccaccagtggaagtgtctttggtgccgcctcaagtaccagtagctccagttccttctcatttggacagtcttctcccaacacaggaggggggctgtttggccaaagcaacgctcctgcttttgggcagagtcctggctttggacagggaggctctgtctttggtggtacctcagctgccaccacaacagcagcaacctctgggttcagcttttgccaagcttcaggttttgggtctagtaatactggttctgtgtttggtcaagcagccagtactggtggaatagtctttggccagcaatcatcctcttccagtggtagcgtgtttgggtctggaaacactggaagagggggaggtttcttcagtggccttggaggaaaacccagtcaggatgcagccaacaaaaacccattcagctcggccagtgggggctttggatccacagctacctcaaatacctctaacctatttggaaacagtggggccaagacatttggtggatttgccagctcgtcgtttggagagcagaaacccactggcactttcagctctggaggaggaagtgtggcatcccaaggctttgggttttcctctccaaacaaaacaggtggcttcggtgctgctccagtgtttggcagccctcctacttttgggggatcccctgggtttggaggggtgccagcattcggttcagccccagcctttacaagccctctgggctcgacgggaggcaaagtgttcggagagggcactgcagctgccagcgcaggaggattcgggtttgggagcagcagcaacaccacatccttcggcacgctcgcgagtcagaatgcccccactttcggatcactgtcccaacagacttctggttttgggacccagagtagcggattctctggttttggatcaggcacaggagggttcagctttgggtcaaataactcgtctgtccagggttttggtggctggcgaagctgagggcgtgtcagcaggctgttcagaccgacgttgccatcaaaacacatacacccagaaagaaacaacagaaaccaaaactcacaaggcgcatgattacttgttttatatttcatgttgggttttccctcccactattaaacagtctgtttccgtacagaacgtatgtgggttttttcagatcacagccaagaagattgccccgtttctgtggctctgagaagccagcagagcctccatcagccagaacactgtgtcttcaaggatggcatcagaagtcaccagcgtcgggtgttgataaacagcatcgaatgtgccgtggtctcacttggacctagcgccctccacatagggaagaggttgaatgctggtgggtcatctttttgaggctgaaacttggttatctcctctccttgttcttttagccattgtgtatcaggaccatccaaggacgcactctgcgattgagtggaggcagaggaagccactcatgccagcagcagttgagtttcagaagcagccatagcgcttttcagtacagtacaatagtagccagcgtgaggcaggacagtgctgcgccttagccggccttggctctcatctccatgtggctcttgggtgccatgtgtcctactccagagaggagggggccggtcacttgagaagacagcctttatattctgtatgtggcagtgacattggtagccacacctacccagtgtctactaacc

SEQ ID NO: 1177 - protein, 2125 aa, Homo sapiens
MRGQLRAAGAEGRKFAVERPGFRGQGRGRQRWLLRHTEGGAMGDEMDAMIPEREMKDFQFRALKKVRIFDSPEELPKERSSLLAVSNKYGLVFAGGASGLQIFPTKNLLIQNKPGDDPNKIVDKVQGLLVPMKFPIHHLALSCDNLTLSACMMSSEYGSIIAFFDVRTFSNEAKQQKRPFAYHKLLKDAGGMVIDMKWNPTVPSMVAVCLADGSIAVLQVTETVKVCATLPSTVAVTSVCWSPKGKQLAVGKQNGTVVQYLPTLQEKKVIPCPPFYESDHPVRVLDVLWIGTYVFAIVYAAADGTLETSPDVVMALLPKKEEKHPEIFVNFMEPCYGSCTERQHHYYLSYIEEWDLVLAASAASTEVSILARQSDQINWESWLLEDSSRAELPVTDKSDDSLPMGVVVDYTNQVEITISDEKTLPPAPVLMLLSTDGVLCPFYMINQNPGVKSLIKTPERLSLEGERQPKSPGSTPTTPTSSQAPQKLDASAAAAPASLPPSSPAAPIATFSLLPAGGAPTVFSFGSSSLKSSATVTGEPPSYSSGSDSSKAAPGPGPSTFSFVPPSKASLAPTPADVAPSAASFSFGSSGFKPTLESTPVPSVSAPNIAMKSSFPPSTSAVKVNLSEKFTAAATSTPVSSSQSAPPMSPFSSASKPAASGPLSHPTPLSAPPSSVPLKSSVLPSPSGRSAQGSSSPVPSMVQKSPRITPPAAKPGSPQAKSLQPAVAEKQGHQWKDSDPVMAGIGEEIAHFQKELEELKARTSKACFQVGTSEEMKMLRTESDDLHTFLLEIKETTESLHGDISSLKTTLLEGFAGVEEAREQNERNRDSGYLHLLYKRPLDPKSEAQLQEIRRLHQYVKFAVQDVNDVLDLEWDQHLEQKKKQRHLLVPERETLFNTLANNREIINQQRKRLNHLVDSLQQLRLYKQTSLWSLSSAVPSQSSIHSFDSDLESLCNALLKTTIESHTKSLPKVPAKLSPMKQAQLRNFLAKRKTPPVRSTAPASLSRSAFLSQRYYEDLDEVSSTSSVSQSLESEDARTSCKDDEAVVQAPRHAPVVRTPSIQPSLLPHAAPFAKSHLVHGSSPGVMGTSVATSASKIIPQGADSTMLATKTVKHGAPSPSHPISAPQAAAAAALRRQMASQAPAVNTLTESTLKNVPQVVNVQELKNNPATPSTAMGSSVPYSTAKTPHPVLTPVAANQAKQGSLINSLKPSGPTPASGQLSSGDKASGTAKIETAVTSTPSASGQFSKPFSFSPSGTGFNFGIITPTPSSNFTAAQGATPSTKESSQPDAFSSGGGSKPSYEAIPESSPPSGITSNTTPGEPAASSSRPVAPSGTALSTTSSKLETPPSKLGELLFPSSLAGETLGSFSGLRVGQADDSTKPTNKASSTSLTSTQPTKTSGVPSGFNFTAPPVLGKHTEPPVTSSATTTSVAPPAATSTSSTAVFGSLPVTSAGSSGVISFGGTSLSAGKTSFSFGSQQTNSTVPPSAPPPTTAATPLPTSFPTLSFGSLLSSATTPSLPMSAGRSTEEATSSALPEKPGDSEVSASAASLLEEQQSAQLPQAPPQTSDSVKKEPVLAQPAVSNSGTAASSTSLVSAEATPATTGVPDARTEAVPPASSFSVPGQTAVTAAAISSAGPVAVETSSTPIASSTTSIVAPGPSAEAAAFGTVTSGSSVFAQPPAASSSSAFNQLTNNTATAPSATPVFGQVAASTAPSLFGQQTGSTASTAAATPQVSSSGFSSPAFGTTAPGVFGQTTFGQASVFGQSASSAASVFSFSQPGFSSVPAFGQPASSTPTSTSGSVFGAASSTSSSSSFSFGQSSPNTGGGLFGQSNAPAFGQSPGFGQGGSVFGGTSAATTTAATSGFSFCQASGFGSSNTGSVFGQAASTGGIVFGQQSSSSSGSVFGSGNTGRGGGFFSGLGGKPSQDAANKNPFSSASGGFGSTATSNTSNLFGNSGAKTFGGFASSSFGEQKPTGTFSSGGGSVASQGFGFSSPNKTGGFGAAPVFGSPPTFGGSPGFGGVPAFGSAPAFTSPLGSTGGKVFGEGTAAASAGGFGFGSSSNTTSFGTLASQNAPTFGSLSQQTSGFGTQSSGFSGFGSGTGGFSFGSNNSSVQGFGGWRS

SEQ ID NO: 1178 - DNA, 7589 bp, Homo sapiens
cgcgccggaaatgcgaggtcaactgcgcgccgctggcgctgaggggaggaagtttgctgtcgagcggcctgggttccgtgggcaaggccgtgggaggcagcgttggctgcttcgacacactgagggcggcgcgatgggagacgagatggatgccatgattcccgagcgggagatgaaggattttcagtttagagcgctaaagaaggtgagaatctttgactcccctgaggaattgcccaaggaacgctcgagtctgcttgctgtgtccaacaaatatggtctggtcttcgctggtggagccagtggcttgcagatttttcctactaaaaatcttcttattcaaaataaacccggagatgatcccaacaaaatagttgataaagtccaaggcttgctagttcctatgaaattcccaatccatcacctggccttgagctgtgataacctcacactctctgcgtgcatgatgtccagtgaatatggttccattattgctttttttgatgttcgcacattctcaaatgaggctaaacagcaaaaacgcccatttgcctatcataagcttttgaaagatgcaggaggcatggtgattgatatgaagtggaaccccactgtcccctccatggtggcagtttgtctggctgatggtagtattgctgtcctgcaagtcacggaaacagtgaaagtatgtgcaactcttccttccacggtagcagtaacctctgtgtgctggagccccaaaggaaagcagctggcagtgggaaaacagaatggaactgtggtccagtatcttcctactttgcaggaaaaaaaagtcattccttgtcctccgttttatgagtcagatcatcctgtcagagttctggatgtgctgtggattggtacctacgtcttcgccatagtgtatgctgctgcagatgggaccctggaaacgtctccagatgtggtgatggctctactaccgaaaaaagaagaaaagcacccagagatatttgtgaactttatggagccctgttatggcagctgcacggagagacagcatcattactacctcagttacattgaggaatgggatttagtgctggcagcatctgcggcttcaacagaagttagtatccttgctcgacaaagtgatcagattaattgggaatcttggctactggaggattctagtcgagctgaattgcctgtgacagacaagagtgatgactccttgcccatgggagttgtcgtagactatacaaaccaagtggaaatcaccatcagtgatgaaaagactcttcctcctgctccagttctcatgttactttcaacagatggtgtgctttgtccattttatatgattaatcaaaatcctggggttaagtctctcatcaaaacaccagagcgactttcattagaaggagagcgacagcccaagtcaccaggaagtactcccactaccccaacctcctctcaagccccacagaaactggatgcttctgcagctgcagcccctgcctctctgccaccttcatcacctgctgctcccattgccactttttctttgcttcctgctggtggagcccccactgtgttctcctttggttcttcatctttgaagtcatctgctacggtcactggggagcccccttcatattccagtggctccgacagctccaaagcagccccaggccctggcccatcaaccttctcttttgttcccccttctaaagcctccctagcccccacccctgcagcgtctcctgtggctccatcagctgcttcattctcctttggatcatctggttttaagcctaccctggaaagcacaccagtgccaagtgtgtctgctccaaatatagcaatgaagtcctccttcccaccctcaacctctgctgtcaaagtcaaccttagtgaaaagtttactgctgcagctacctctactcctgttagtagctcccagagcgcacccccgatgtcgccattctcttctgcctccaagccagctgcttctggaccactcagccaccccacacctctctcagcaccacctagttccgtgccattgaagtcctcagtcttgccctcaccatcaggacgatctgctcagggcagttcaagcccagtgccctcaatggtacagaaatcacccaggataacccctccagcggcaaagccaggctctccccaggcaaagtcacttcagcctgctgttgcagaaaagcagggacatcagtggaaagattcagatcctgtaatggctggaattggggaggagattgcacactttcagaaggagttggaagagttaaaagcccgaacttccaaagcctgtttccaagtgggcacttctgaggagatgaagatgctgcgaacagaatcagatgacttgcatacctttcttttggagattaaagagaccacagagtcgcttcatggagatataagtagcctgaaaacaactttacttgagggctttgctggtgttgaggaagccagagaacaaaatgaaagaaatcgtgactctggttatctgcatttgctttataaaagaccactggatcccaagagtgaagctcagcttcaggaaattcggcgccttcatcagtatgtgaaatttgctgtccaagatgtgaatgatgttctagacttggagtgggatcagcatctggaacaaaagaaaaaacaaaggcacctgcttgtgccagagcgagagacactgtttaacaccctagccaacaatcgggaaatcatcaaccaacagaggaagaggctgaatcacctggtggatagtcttcagcagctccgcctttacaaacagacttccctgtggagcctgtcctcggctgttccttcccagagcagcattcacagttttgacagtgacctggaaagcctgtgcaatgctttgttgaaaaccaccatagaatctcacaccaaatccttgcccaaagtaccagccaaactgtcccccatgaaacaggcacaactgagaaacttcttggccaagaggaagaccccaccagtgagatccactgctccagccagcctgtctcgatcagcctttctgtctcagagatattatgaagacttggatgaagtcagctcaacgtcatctgtctcccagtctctggagagtgaagatgcacggacgtcctgtaaagatgacgaggcagtggttcaggcccctcggcacgcccccgtggttcgcactccttccatccagcccagtctcttgccccatgcagcaccttttgctaaatctcacctggttcatggttcttcacctggtgtgatgggaacttcagtggctacatctgctagcaaaattattcctcaaggggccgatagcacaatgcttgccacgaaaaccgtgaaacatggtgcacctagtccttcccaccccatctcagccccgcaggcagctgccgcagcagcactcaggcggcagatggccagtcaggcaccagctgtaaacactttgactgaatcaacgttgaagaatgtccctcaagtggtaaatgtgcaggaattgaagaataaccctgcaaccccttctacagccatgggttcttcagtgccctactccacagccaaaacacctcacccagtgttgaccccagtggctgctaaccaagccaagcaggggtctctaataaattcccttaagccatctgggcctacaccagcatccggtcagttatcatctggtgacaaagcttcagggacagccaagatagaaacagctgtgacttcaaccccatctgcttctgggcagttcagcaagcctttctcattttctccatcagggactggctttaattttgggataatcacaccaacaccgtcttctaatttcactgctgcacaaggggcaacaccctccactaaagagtcaagccagccggacgcattctcatctggtgggggaagcaaaccttcttatgaggccattcctgaaagctcacctccctcaggaatcacatccgcatcaaacaccaccccaggagaacctgccgcatctagcagcagacctgtggcaccttctggaactgctctttccaccacctctagtaagctggaaaccccaccgtccaagctgggagagcttctgtttccaagttctttggctggagagactctgggaagtttttcaggactgcgggttggccaagcagatgattctacaaaaccaaccaataaggcttcatccacaagcctaactagtacccagccaaccaagacgtcaggcgtgccctcagggtttaattttactgcccccccggtgttagggaagcacacggagccccctgtgacatcctctgcaaccaccacctcagtagcaccaccagcagccaccagcacttcctcaactgccgtttttggcagtctgccagtcaccagtgcaggatcctctggggtcatcagttttggtgggacatctctaagtgctggcaagactagtttttcatttggaagccaacagaccaatagcacagtgcccccatctgccccaccaccaactacagctgccactccccttccaacatcattccccacattgtcatttggtagcctcctgagttcagcaactaccccctccctgcctatgtccgctggcagaagcacagaagaggccacttcatcagctttgcctgagaagccaggtgacagtgaggtctcagcatcagcagcctcacttctagaggagcaacagtcagcccagcttccccaggctcctccgcaaacttctgactctgttaaaaaagaacctgttcttgcccagcctgcagtcagcaactctggcactgcagcatctagtactagtcttgtagcactttctgcagaggctaccccagccaccacgggggtccctgatgccaggacggaggcagtaccacctgcttcctccttttctgtgcctgggcagactgctgtcacagcagctgctatctcaagtgcaggccctgtggccgtcgaaacatcaagtacccccatagcctccagcaccacgtccattgttgctcccggcccatctgcagaggcagcagcatttggtaccgtcacttctggctcatccgtctttgctcagcctcctgctgccagttctagctcagctttcaaccagctcaccaacaacacagccactgccccctctgccacgcccgtgtttgggcaagtggcagccagcaccgcaccaagtctgtttgggcagcagactggtagcacagccagcacagcagctgccacaccacaggtcagcagctcagggtttagcagcccagcttttggtaccacagccccaggggtctttggacagacaaccttcgggcaggcctcagtctttgggcagtcggcgagcagtgctgcaagtgtcttttccttcagtcagcctgggttcagttccgtgcctgccttcggtcagcctgcttcctccactcccacatccaccagtggaagtgtctttggtgccgcctcaagtaccagtagctccagttccttctcatttggacagtcttctcccaacacaggaggggggctgtttggccaaagcaacgctcctgcttttgggcagagtcctggctttggacagggaggctctgtctttggtggtacctcagctgccaccacaacagcagcaacctctgggttcagcttttgccaagcttcaggttttgggtctagtaatactggttctgtgtttggtcaagcagccagtactggtggaatagtctttggccagcaatcatcctcttccagtggtagcgtgtttgggtctggaaacactggaagagggggaggtttcttcagtggccttggaggaaaacccagtcaggatgcagccaacaaaaacccattcagctcggccagtgggggctttggatccacagctacctcaaatacctctaacctatttggaaacagtggggccaagacatttggtggatttgccagctcgtcgtttggagagcagaaacccactggcactttcagctctggaggaggaagtgtggcatcccaaggctttgggttttcctctccaaacaaaacaggtggcttcggtgctgctccagtgtttggcagccctcctacttttgggggatcccctgggtttggaggggtgccagcattcggttcagccccagcctttacaagccctctgggctcgacgggaggcaaagtgttcggagagggcactgcagctgccagcgcaggaggattcgggtttgggagcagcagcaacaccacatccttcggcacgctcgcgagtcagaatgcccccactttcggatcactgtcccaacagacttctggttttgggacccagagtagcggattctctggttttggatcaggcacaggagggttcagctttgggtcaaataactcgtctgtccagggttttggtggctggcgaagctgagggcgtgtcagcaggcctttcgatccctgggaccaaccgcatcctcagcttcttccccgagaaatgctggagcaggctgttcagaccgacgttgccatcaaaacacatacacccagaaagaaacaacagaaaccaaaactcacaaggcgcatgattacttgttttatatttcatgttgggttttccctcccactattaaacagtctgtttccgtacagaacgtatgtgggttttttcagatcacagccaagaagattgccccgtttctgtggctctgagaagccagcagagcctccatcagccagaacactgtgtcttcaaggatggcatcagaagtcaccagcgtcgggtgttgataaacagcatcgaatgtgccgtggtctcacttggacctagcgccctccacatagggaagaggttgaatgctggtgggtcatctttttgaggctgaaacttggttatctcctctccttgttcttttagccattgtgtatcaggaccatccaaggacgcactctgcgattgagtggaggcagaggaagccactcatgccagcagcagttgagtttcagaagcagccatagcgcttttcagtacagtacaatagtagccagcgtgaggcaggacagtgctgcgccttagccggccttggctctcatctccatgtggctcttgggtgccatgtgtcctactccagagaggagggggccggtcacttgagaagacagcctttatattctgtatgtggcagtgacattggtagccacacctacccagtgtctactaaccacagtgcagatagcccttgggtagacccaggaagtgtgaagacagacactgctgttgccagacaacactagcagaacgatgctggatttgacaacagtgtttgctaggacggcccagagctcatcactgcagttttattagagtgcttctttatctttaatgcagtatctttgaggcctgtaacatcctagatagttgccatcaaacaaggaccgtctcgcattgaaaacagatgtaagaatttctctttcaggcccagaatctgacagtgctttggcttgggtcatgagcagcggggagttgggaagagatttttttttttagagttttacatattggcaggttgtatttttttaatgttttaataaaagtttgacatgacattaattcatca

SEQ ID NO: 1179 - protein, 2125 aa, Homo sapiens; identical to SEQ ID NO: 1177

SEQ ID NO: 1180 - DNA, 38784 bp, Mus musculus
  misc_feature (1)...(38784): n = A, C, G or T/U
ctgcctcctcagctgtcccccgcaattcctcaactgccacctgtcagctgggatagagccttctaagtgacaagttacagttccttgcctgtgtgggagacgccgtgaatgttgtccctggtttgcccttctttggagctctcccaaaacctggcccaaagccaaggccaaggccaaggccaaggccaaggacaggagcagtgcagctcagatgctgtggagggaacgggagcagagcagttcagacctcgtagttcccatctgtggcaagggcatgcccacctccctgcttgcttggctccgtgggatgaatgaggtagagtacgtggcaccaagccagcaccctggaacaccccctgctccatctccccaggtaccacgattacaaatctgggtatcaatgttgggttattgttctatgctgtgtgaccagatattgttactctctgtgttctctctgggtacctttccatagcaggacggccttgacccctgaggccatgtgggttttcctgacccacacatgtgctgtcatggcttggatagactttgtgtgagaacactggaactctggttatctttctccctgctccctgctatctctggggtgcatcccaggacctcagaggctctaacttaaggaatcggaatgcagactataaatcccaaagccacttgcccagtaacgtttgctcagcacctgagatttgggggatggccacggaggaatgtccctgctggcctcttcccggaactggagccagggcctgaggcctcacagaacaattgaagactatacttcctgtcttggggcggaaggcggcttcccccatctgcagggcaatggcggaggcagggtggggtgagggggagagggaagtccttgcttcctagcttcagggtgggagggaagtggtgggggtggcccagcctgggagaactccccttgggctagctgtgaccaagtggtggctccagcatgaagctaccttcggagagaggggaacaagtggcctggggatgaacagacagacacccggcagccagggctatcagggaaatgtttaggaaagtctaggagtctctgctgcagatcaggcctggtgcaaatgaggcccattgtttccattatcagtgatcctggttgtctggctgtctctgtactcctctgtccagggcatgtgattttagggtctgacttccagaatgctgtaccctagtctgggcctggcttctagagacaccacaggtaactaaatagcaagtaaagcacacacaggtgaagaaaggggccactgcagggcgccacgtagtgagagcgtctctggggactgactgtggtaggagcagggagttgtagagagcccaggcaacttgcaattgggaaagagaattaagatctgcccactgtgcagagtcctgctgttaaaatcaaacaggtttttatgggagctatagtgtcacattggaagccgagcctagcgtcctgctcagtggcagaggtcttgccttgcacgggagcggccttggtttccatccccagcaccagaagagctaataagacatgcgagagtctgatagggaaggtttatggtgaagaaaatgctaagcatgagaacacatcctgtgtgtacacggagaagcatctggaaggatgtttactgaagtataatgtcaggagcgacctccaccggaaggagggcagaggagatagataccttggcttttactttagttttttttgtttgtttgtttgtttgtttggttttttttttcaagacagggttttctccctgggctgtggtagcgcgcgcctttaatcccagcactcaggaggcagaggcaggtggatttctgagttcaaggccagcctggtctacagagtgagttccaggacagccagctacacagggaagccctgtctcaaaaacaagaacaacccctgaacaacaaaggaaccaaaacctttccagtatgacaaaccccaacccacagctcttccctctgcccttgacccagtccagagcagtgccatgttgtgaacctgaaaggtgacagatggtctctgcagaggctttggtagcacaggactccacagcccaaggagcagaacatgccnnnnnnnnnnnnnnnnnnnnnnnnnnnnnnnnnnnnnnnnnnnnnnnnnnnnnnnnnnnnnnnnnnnnnnnnnnnnnnnnnnnnnnnnnnnnnnnnnnnnnnnnnnnnnnnnnnnnnnnnnnnnnnnnnnnnnnnnnnnnnnnnnnnnnnnnnnnnnnnnnnnnnnnnnnnnnnnnnnnnnnnnnnnnnnnnnnnnnnnnnnnnnnnnnnnnnnnnnnnnnnnnnnnnnnnnnnnnnnnnnnnnnnnnnnnnnnnnnnnnnnnnnnnnnnnnnnnnnnnnnnnnnnnnnnnnnnnnnnnnnnnnnnnnnnnnnnnnnnnnnnnnnnnnnnnnnnnnnnnnnnnnnnnnnnnnnnnnnnnnnnnnnnnnnnnnnnnnnnnnnnnnnnnnnnnnnnnnnnnnnnnnnnnnnnnnnnnnnnnnnnnnnnnnnnnnnnnnnnnnnnnnnnnnnnnnnnnnnnnnnnnnnnnnnnnnnnnnnnnnnnnnnnnnnnnnnnnnnnnnnnnnnnnnnnnnnnnnnnnnnnnnnnnnnnnnnnnnnnnnnnnnnnnnnnnnnnnnnnnnnnnnnnnnnnnnnnnnnnnnnnnnnnnnnnnnnnnnnnnnnnnnnnnnnnnnnnnnnnnnnnnnnnnnnnnnnnnnnnnnnnnnnnnnnnnnnnnnnnnnnnnnnnnnnnnnnnnnnnnnnnnnnnnnnnnnnnnnnnnnnnnnnnnnnnnnnnnnnnnnnnnnnnnnnnnnnnnnnnnnnnnnnnnnnnnnnnnnnnnnnnnnnnnnnnnnnnnnnnnnnnnnnnnnnnnnnnnnnnnnnnnnnnnnnnnnnnnnnnnnnnnnnnnnnnnnnnnnnnnnnnnnnnnnnnnnnnnnnnnnnnnnnnnnnnnnnnnnnnnnnnnnnnnnnnnnnnnnnnnnnnnnnnnnnnnnnnnnnnnnnnnnnnnnnnnnnnnnnnnnnnnnnnnnnnnnnnnnnnnnnnnnnnnnnnnnnnnnnnnnnnnnnnnnnnnnnnnnnnnnnnnnnnnnnnnnnnnnnnnnnnnnnnnnnnnnnnnnnnnnnnnnnnnnnnnnnnnnnnnnnnnnnnnnnnnnnnnnnnnnnnnnnnnnnnnnnnnnnnnnnnnnnnnnnnnnnnnnnnnnnnnnnnnnnnnnnnnnnnnnnnnnnnnnnnnnnnnnnnnnnnnnnnnnnnnnnnnnnnnnnnnnnnnnnnnnnnnnnnnnnnnnnnnnnnnnnnnnnnnnnnnnnnnnnnnnnnnnnnnnnnnnnnnnnnnnnnnnnnnnnnnnnnnnnnnnnnnnnnnnnnnnnnnnnnnnnnnnnnnnnnnnnnnnnnnnnnnnnnnnnnnnnnnnnnnnnnnnnnnnnnnnnnnnnnnnnnnnnnnnnnnnnnnnnnnnnnnnnnnnnnnnnnnnnnnnnnnnnnnnnnnnnnnnnnnnnnnnnnnnnnnnnnnnnnnnnnnnnnnnnnnnnnnnnnnnnnnnnnnnnnnnnnnnnnnnnnnnnnnnnnnnnnnnnnnnnnnnnnnnnnnnnnnnnnnnnnnnnnnnnnnnnnnnnnnnnnnnnnnnnnnnnnnnntggtgtgtctgaagacagctaacagtgtgcttagatataataataaataaatctttaaaaaaaatagtattcttttcagactatgtcttactatataggtcctagaactcactctgtaggccagattggccttaaactcagagattgcctgtctctgcctcctgagtgttggaattaaaggtgtgtgcctccacccaggcactccagttacatttgtttttaaagatttatttatttattatatgtaagtacactgtggctgtcttcagacacaccagaagagggcgtcagattttgttacgggtggttgtgagccattatatggttgctgggatttgaactcatgaccttcagaagagcagtcggtgcttttaccctctgagccatctcaccagcccccagttacattttttaagtgcataattttaaaagaaaacattaagtgaatagaaaatagaggagacactcagacaagagcaaagtgaagaaaatccctgctgcttagggcacgtggccctgtgaccggatcgacctttgtcccctggctgtagaacccaacactgaggagttgggattcatgacctcaggaccctgagaatgaacaggagaaaaatagagccccaaggggctgcgtggtctgtgtggtctgcgtgggctgcacggggctgtctgtgctgaggataaagccaggcccacagacagctgctaatctgcatatgtgagaaaagtctagaacctttgagagggcatttaaaaaacaaaaacaaaaacggagaaacagggaaagtttactgcttttagtttagctcagggccatggatttggcgagttgtgtgtgtccccaagaccgcgagggggtctgtactgggctggcttctggctgctgacttctgaagtccttgaattggggcgaccctcttcagcagcgtggtgttcctccttggtcaccaactgcaggtcttcctgaatccccttcaccctccgtcatacatgctggtcagagagaccctctctgtgtgcacatgcgttgcttttttttgttttgtttttataagcacacagatgtatatgcatgtatatctgtttgcacatgtgtgtgcacatgcatttgtatacatgtgcatgtgtgcgcttatatgtgtctgcatgtgtacagatgtgacatgtgtggacatgtgtgaatttgcgtgcacacatgtgtacatttatagatgtgtctgggtgtgcacgagtgtgtgagggatagctttgtgctgtggtcacagtgagtcctaaaagtgcctgttccacctgcagctctgaggggtgaactccgggcagtcagtgacccagcgtgctgccgaggggcagagagccaggctacaagctttatggggcccatgtataggtcaagtcgtggatacatgggaaggctcaaggcgggtgtggctctgtcctcttggcctgtgtggttcttctggggaaagactgcccacaaacagtcgtttaattgccctggaccatgtgccaggagacagttacaaagtcctaatggtgctgaacaccggccaagggcacccggcttgtgtaaagagccagagtggtttgcctggggttgtggccagagcttggcagctgccccctccccccatcagagcaggagcagggagacactaaggagggtgggagctgcagggccaaggtggggagctgagaattagccaagcagcagccgcatgcacaggtgagtgcttgacctctcacagtaggcttagcaggatcagagtaatgagaccaaacttgtgtttgtaaaaaatctgagggacttctgtgagatcgggttagaatctgggagaccaggcagggcagtggagtctctgccagggacctggagtcaaggtggtaccaagtgcccagggcacggctctggtcctcatttccctggctctgaggcagatcctctgcagacacggtgagcacgcaccatgtcacaagctgcaggattagagatgttgaggggatctagggacaccacctcaggcgatgccaggggctctgaaagcatgcagaggtccaggttcaagtctgggcttgcccgctactctgacatctcacaccccagaggatgaggacagaagcatggcaggtggtctgggcagcaggtgacttgtgtacctctgcacagccttggctgagaaggtccccgtagctgtcaccgcatccaagttctcagtattggaatattcctgtgttttcattcctcacgaggtctcagggtctggtgacttgggttttgttttgtcttgtgtgttagggggtttcatgaagtcaaagcagcctccaggtttctgaccttgaacacttggtctcttgcctctgccttcccgagagcccggacttcaggcctcagcgtctcgtcccatgcaggtcaggaaggctgagtgtcaaggctaaggtctgagttcgcccttccagagcaaagtgcacccctacagaagtagccagccttgtggtgaccatcttgtcacttgtgggaatgtgtacagcataaaaggcctttaatgccaacccttgggaggcagagcacaacatctgagtttgagaggccagcctggtctatacagcaagttccaggacagccagggttatactgaaaaaccctgtctggaaaaaccaaaatccaaaacaagacaaaacaaacaaaaagagttcaaggccggcttcagctctagggagagtttggagccatcttgctttatatgagaaccctgtctttcttattttattgtgcagtctgccttttgaccgctagatcctcaagagtgctagcttactggacatggtctttccagacaggatttctccgtatagccctggccatgctgaactcacggagatccgcctgcctctgcctcccaagtgctgggcttaaaggcgtgagccagcaggccctgcatcctgaagcctttaaggtctcctgttactccagctgtggcaggtggtgtgaatacactgtctctctaggaaagcctggggtgggcttggatgctattggagtggatgctggtgggagaggtgcagagcagtgtgactgacacatggctgggccatgtttccatcccatgttgctttgcgtttctcacaccatgtccctgaccagcccctggcccttcccatcttccccggctagaaccccgcaggctcccttgatggtccatggcgagacaatgcagttggctctgctttgcttctgagtaacatccctcaggagactctgctggctgccagctcatggagactgttacctgtctgtgactggcagggcttgatcattcaggggtagggtcacagagcaaggtaacacatgctaagtagccccacccgggcctgcaggctgacccagggtgggctgtgggtttttttttttgcaagtctgttctgtcttttacatttatacattcttggaggtgcagggcacattgcccctatgagcttgtgaggtcagaggtcagttttttgttgttctttttgtttgtttgtttgtttgttttttgagacagggtttctctatagctctggctgtcctggaactcactctgtagaccaggttggcttcaaactcagaaatccacctgcctctgcctcccgagtgctgggatcaaaggcatgcgccaccacgcctggccagaggtcagtttttagaaacaacttctctcctttttccatgtggatctcagggacacaactctggtcttggttgcatggcaagtggctttaaccgatgagccatctggccagctcttgatttcaaacgccttttcactgggcttggtagctcatgatggaggctgaggcaggaggatctccctcagatttaaggccagcctgggctactggagtgatggggatagagtaagatttttttttaaatttattatatgtatgtgactatactgtccctgtcctcagacacaccagaagagggcatcaatcagatcccattgcagatggttgtgaatcaccatgtggtttcgagacgttcaactcaggacctctagtagagctctttaccactgagccctctctccagcccagaatgagatcttctaacaccctccccaccataacccccatgccaaaagacgtaaaacggttcccatcccaggctagggatatgtggttcagtgattagagcatgtatagctttgtctagggctttgggttcctcttctcagcacagtaaggcaaacagggcactagaaagacttccaaggagaggacgccagcaaaccccgaaacctaaagcaagggcctgaacccagtggagggagatggagagacggaagcagcttcagggcagggctgagggccccctctggtctgaattctactggggagtcagggaccccacctggggtgctgacccactgctgtggagctgggcccaagggattgcttgccgtggggagacagtttcactgtggctagacatgctcaggtcctgaactgtcacacatggttttgtgagcttagcaatgaggggaacagaaagtttggcggagtctggggtcccgggaacggggctcagcttctgaagtgcttacacacaggcacgggtaccagagtctagatccctagggtgcaagggaaaactggctgggtgtgagggcctgctcgtaattccagtttgtgggagacagagattggggaatgcccaaagtcaggcagactaacatggagagtacctgggcctctcacaggagtgcatgtgcatgcatgtgcacacatgtgctgcccccccccacacacacacatgtacacacatcacacaaacgccaacctgctcctgcccgttctcctgcagccccagtgctgcgacactccagcagtcagactgaaagccgcatggttagggtgcgcaattcagtggcgttaggcaccctcaaaagcaccgtgccatccttctctggaactctctgcctttgctaactgaactccactctttaatcagcaccctcctttcctgcccagggcagccctggttccactttccgtctcagaactcaggtgctctgggcgccacgcgtaagtgctgtcctgcagtagttacctttctgtggtggcttctttcagttagcacagtgcccctgggctcctccataccacagtgtgtgtcggaatttcctttcctttcaaggctccttcattgggtggagagacagatgtggcaggaggacgttctactgagctgccctcccaccctaggctgtattcctaggctgtgtgtccagtagatgccctcgcctctgagaagccacggcctccaccctaagatcatagaactgtgtggcttcatacggttattccactggtgttcacgaaggcccagctttgccagtgtttgtcattactgtagactcagtgacaagtccctgtcaagagctgggcttctcgccgggtgtggtggcgcacgcctttgatcccagcactcgggaggcagaggcaggcggatttctgagtttgaggccagcctggtctacagagtgagtgctaggacagccagggctatacagagaaaccctgtcgtgaacaccccccccccaaaaaaaagagttgggcttctccaagtcccaaatgacacctactagtttaatgactggctctcatggagggtgctggccttcagtggtggtctggcctgggaaggtactcagagaatagtctttaaaaaaaatatatatatacataatcatatatgtatatatgattatatatgtattgtatgtatatgggtgtcttgcctgtgtgtatatcacaaggagagggaacaggatcccatgggattacagttatatacatggttgtaaactaccatgtcgggactgggacttgaactcaggacctctaaaagatagcagtgctcttaactgctgagccatgtttccagccctccaaaatattttaaatgtgtgtgtgtgtgtgtgtatgtacacatgagtgcgggtaccacataggccagaagagagcaccaggcctcctggggttggagttaagaatttttgctcatgtgggaattgaacgtgggtcctctgtaagagcagtaggtgaactactgagtcgtcttttcagcccaacattcgggttattgaagcgggctgtgactgggctcatcttacctggtattgaataatgtcctgtttattgtctgctccatcccacgtcagccccatgagcaaagggggttgagtccctcctgtctccagggtcccaggacagtacctgatacatcctaagaacgcagaaaagccttactggttggtgactgagcctctcctgaccttctttgctccctaggtctagctgggagctccccgacctccaggaaggaaagatcgaggccatcagtgactctgatggggtgaactatccctggtacggcaataccacggagacctgcacgattgtggggcccaccaagagggactccaagttcatcatcagcatgaacgataacttctaccccagcgtcacgtgggccgtgcccgtcagtgagagcaacgtggccaaactgaccaacatctaccgggaccagagcttcaccacgtggctggtggccaccaacacctccaccaatgatatgatcatcctgcagaccctgcactggcgcatgcagctgagcatcgaggtgaatcccaaccggcccctgggccagcgcgccaggctgcgggagcccattgcccaggaccagcctaaaatccttagcaagaatgagcccatcccgcccagtgccctggtcaagcccaacgccaacgatgcacaggtcctcatgtggagacccaagtacgggcagccactggtggtgatcccgcccaagcaccggtaacagccaggctgctgcgaggtgagactcaacgtagtaacaatattactgctcagaaggaaacccagatgccctgtcggtcattcagaaaaatacaaccattctaccttctcccggggcggatctcactgtgctaaaaccggccggcctcctggctcctccacgtgcttccctgcagggaggggggagccagggacaacaggcgcccacccaccccacccccagggctcctctcctcctatcacaacctcagtgttcattgactctccgaaacaccgctttttttaattttcccctcctctttgtggatgcaggggcaggggaggaggctggttgtcaggggacccagcctgctcttcctgcctcccctctgcctcccctctgccatgcggccttatgtagacttgctttgccaaacttttgccttaagctgaatttaaaggagagaaagaactggaaaggccacggatctctgccctacaggacttgccctcttcagtcagagctgggaagaggggaggctcacctgaaccctgctcctcctcctgggcgtctgcgtgagggggcaagagagcgatctcaggtctaaaaccagctgttttatcctgttgtttgtgcagaatcaaaaccacagactcttcctagagcttctattccaccccagtagaacccctccccagtacctgccgggggtgggggtacgagctgagcagggcatagatccttgaccccacccctctcctcagtagccttaagttgcctgatggaggtattctgggagaagagtccccaaagtgttgggttggagctaggtaacgttttcacctttgctatctctagaacccacccctaggaatgtggctttttctcttccattatcttggtcccaaatgcctggcagggttggggttggggcattgccactgagtctggacagtcccagctgtcttaaggtaaagatggcatgccctttcctcctggccagcactatcacacttgaatctggggttccagcacccagggatgcccatacgctagcacactgtaaagaagccatatcagagcttctggttcattctcaggggaagcggctcccggactctctggggtgggctgcatataggagctaagcaccagctggagggtgcttaggtccctcccctccccatcataggtgctcctggggaggtggaggtctggggagcaagcagtcagctgactcacctgggaggtgtcaggccattgtgaaactggcttgacacatggtaggcagtcttggggtctcccttctggagccctagaacttgtccttgagtgatgccatggtttctagaaatgtctgctttgagctgcttgagggacactccgttaagcgtactaacagctgcatcactggattcgaaccagtaataagcacagaaaactgttatcacaagaaaaagaatgtttttgctgctgctgagccatttgtaggggagcctcggagacagcatgggaggtacagctagatcccagctctatttctacacttgagacgcttgtccttccagggtacttaatgtctggtcattctcagccactagggctgggggctgcagtcacctggagcacaccgaacagatcatgcccatggcacagttggctggagagccacttgtcagggctggacctccctggagccttctctttctctatgtcatcttagctgggagagccatgaggtctcagccccacactagatcagggttggctggtgactggaaaggccttctctgtgttcaggacttccttgccctgaagaaaagagacaggccctggtgagggttgggagcgagtccttgtcctgggctgagtgctctctaaaggtttggtgggaataaggattaggaatcacagtaggggtggcccgaactgctctggacatggggacccccaaacccacatatcttgcgctccttccccactgcatgcctggctttgcccacctggcttccttggctccccgttcctctctcccctcctgcctgacagaagacagacagggctagggagaaccccagagaggctgtgtgggtctgggcgagaacactcagcttctcttgggttggtcccctcggtccattgcctcatgttgttgacagaccccaggcttccctctactgctgtccttcacacccatgcccatccgggcatggacactcactgtttctagcaataagcaccaactgtccttggtcacggacagtactgtgaacacgaacccatgcgtgcacttaccagcaggcgcgagactcttgaagacaatgtcaaagaaaccttttttttttttaaaaaaagattaaaataaaagatatgtagagaaataaaattaattttaaagcacccttggctctggtggcaattatgtagggtagcaggctcactgtggctggccaggctgagagcgttgggaggacgctgtgtggctatgtggttcctgtgctgagtgcctgaagtcagggactctggcctgtcagcctgtacagctgctctttctcatgctcctgtctccgtcgggtctggcactgggattgtagaaatattcctgactagtgtcccagaaagacagtagacttaagaacggcttttgcaggtgtgtgtgtgtgtgtgtgtgtgtgtgtgtgtgtgtgttacttgcccatgcactccacatgtctgtagagaccagaggccaatgtcttcaagggctgtctattttactttttgagggagagtctcttgatgaaccttggactcaccaataggttagactggctgcccagcaagtcccagtggcccagtgctggggttgcgggcttacaccacggtgcccagctttacttgggtttgagaaatcccttctggtcctttcccgtgtgcagcaggcactcagctgagtggccccagcttttggaacatttgtgtggaaagttgggggactcatagttgctagagtgactctgtgtcctgatggtggactcctggcacaaggtcatttgtgtggacttggatgaaacccaggctttcttggaaaggggctcttgggcgctgcctgtggccaatgtggataaataaattaggttctgattctagagtggctgggccatgatggccatcggggcttccccatcttatggacaaggaagcaggttgtgaatgggggtgttgagaactggcagacctcatgtcttacaagaggtagagccgaaatttgactccagcctgagccagcctctgacactgcatgctcagccagagcagaagactctgggtatacatttggtgccaaataatcatcggtttttattagggaagtccttagcctgcagcatggcctccatccagggtcttcagacaacaaaggcctttctccccacctcacgtcccagaagtctgtgtacttagttatgtacgcccatagaaaagcaggctttgaagaagggttagcttcacctgagggctgtaggcttccccagagtgggtgtggcctcactgcacggctatgaggggcaggaagtgcccaattcatccatctaggccttaggcttggcttctctgggtactttacaataccaacagtactggtctcggttgcttgaggccaagacacagtgcaggaagttgcatcttgggcttctctggtactctccatcagatggctcctgggaggtgcctgtgtcagtttggtttttgattgtggattgcgcatgcgtgcaagggtgcaagggaccgtgatgagtttttgttgttttgtggtatgtgtgtgtgttctcaaaagagtagttcagacagctcacacaaaccagaccccaggagctcaggaagccatctttgggacagcatatagctagctgcaccacagtgggatgtgacagcctgggtttgggtagtggaatgtgcaggaggcaagtggcttccaggtgacatctgatgactcaatgaaagcctcctgcctgctctagctgacagcaagttaaattcagaagtccaggctaggctgagaacgagcgagagatatcaagtccacaaaagcaggggcagcgtcccctccagggcctccaggcctggagccagctgtcggaatgggcaagccactgccgagcgtggttccaggaagcaggtgcacagaggctctctgcttgcctgctgctgtgacagctgtccctccgccgccgagcctctgccctagtcgatcccagaagagccagaaactcactgtaggatcagccatgaggccacaaaggaagcacagccacggcttggtggagactcgctgggggtgcgggggtgtccaggggctgttcagctcttgggtttgcagacacttctagaagctggagtgctttttgtggctttgtgtcccctggccatcctccatgtcctctgggtcctccacaaacactggctcccagctggttgaggtccggatactggaagcagcaacaggccacagcgcacacactacccctaaactgtccactgaaggacttcagagagactgttggtaatgtgcttgccacgcaggagctatgacccaggtaaggaaaaaaaaatcagggtggatgtctcttaaggaatcacacctgaggttgactgctggcctctgtatagacacacacacacacacacacacacacacacacacacacacacacacaaaaccagagcctactgaagtattatgcaagcagctataggaaagttccccatcccacagctgtacatggtcccagggtctttcctgcctccccacccccaccttctcagaggaagaaactggccctgggaagtgacctgaggcctgttgaaggtcactagatgaaggtcactagactaagaagcttcagaaggccgtgggcttttccccgtgactttgccagtttctctattgccccttcgctcagcctgtcctgcaaggcatgaagcttattgccacgctcagcagcccttctggtactggaaacttctgtcccttgagacggagtttcacactgtaccccagattggcctgggactcggtatggctcacagactggccttgaatttactgtgacaactgtctccacaaggagcaggcatgttctgcgctgtgaccagagaaatttctgatcactctgaatcctgccaaaagccagtccatttgctgctgtctgggctcagccttttccactcctctagacatgacggctgggaatgcagagacaggattatcttcaccctggacctggctttggttggtattttatcaggtgacattttagaccagattggtgaagggtggctctctggagtgagcatctagatgtccaggactattcctggctgccacttgtcttgctgagtgaggtctagtgagctgacctgactagtccggtctcctcaggcaggagacgcacataccttgtctgcagacgggcaggcttcgtgataaacagggcccttgctcagagcatctgtcctggaagccaaagatttttatctagagaccaaggatgctgtgtttgtctgggatggggctatttctgtgtacagacaggcaggaagataagaggagggaaaacatctttctgggtaccatggtgacagggacttactgtacctttgaagtcttttatgagcctttggggcaggtgtttacagctctaaacttgggtgtccctaattcttttagtccagatatagctcatcatcaagatgtggtaaggaaatggggaccctgcagggcagggggctccctgtgaatgctacaacactggcccgaatctggttgtccagttgagaaagagttccattggggactcagtgtctctgagcaatgaagaactctgcagtggggtacagctaatcaccccggcagcatggtgcctgatctagcagcttgccagacagagtggttaaccagggctttggatgttactaagtatgaggcttagggatttcctgcaaacagtctgccacttcctgtgaaggtgaggcagttagtctcctggcttcctaccctttgcagccctgcctgtcctccgagtccttgcccccgtggctgtgaagcacagcggtgtgccaacctccctacgagatttggggatcccacaggagctgtgactgtgacactggtagaccggatggtcacatgactagggaacccagaaatgcttaatcctgtctttgaatatccctccctgtcagacagccatgccacaattactgtattagcatacaaccaccccccccccacacacacacacttatgtttaagtttgctgttttctgtgtgtggtttttttgcatgtatgtctgtgcactatgtgtgtccccggtgtccgtggagatcagaagtagtagttacgtatggttgtaagccaccacgtggtgctggcaacaaaaccctgatcacctgtaagaactagagttcttagccaccgcgccatctctccagccccttcgctcacttggtggtgggtggtgaggtctcattcccttttcagatggttgcatgcaaagttgctgcaaaggctttttgctaagtatagagatggacactggtgagttatcctgagagtgtgatggctgggccacgagagttgtgcacgtaaagctttaaagaaaggcacaaatgttctctttacgtagcccaggattggagcccagagagaggcaccactcgcttttagggtgggtttttcagcttccattaacctaaccaagataatcggtcacagacttgccctgaggaggatctctgagtggtgcttgaacctgtcacattggtgttcactgttaatcatcgtgggggctgttgggagccgccgactcctagcagaaagcgtccatcatctctgcggctgagggctatttacttacaggtgggttagagaaacccaccacagctgaacactctgataacatcttgtttttctcctacacatcctgaacctgtggttaaaagtgtctccagctgcactccccagcgagtgcatatacacccattgttgcctttcaacaaatgagacttgagactgatccttgatatcctgttttgtttctattcttcgagtctcttgaccctcagtccccctccccatcacagaccccgttgactgacaagaggactggctcaggggaccacatagagtttctgtacatgtgtatgtttaactcaggtggaacacgtacacatcctccaacatagatcatttatttctggtagaaacattcaaaatacttccttccagctctttgaaacctatgctctgttattagacaaagttactgtgtgtgcagcagcctgccacagatatctgaccataatctggtgccaccgaccctccacccacttgccgctcccctgagatagcctttttaactgtagacattcatgtagtagtctgtgccagtatcttatttaacaattgtttgtttgtttgtttgtttttggtttttcaagacagggtttctctgtatagccatggctgtcctggaactcactctgtagaccaggctggcctcgaactcaggaatctgcctgcctctgccttccgagtgctgggattaaaggtgtgtgccaccacggcccagctacattttctttttcttgagttaggatctcatatagcccaggctagcctcaaacttgctatatagccaaggaagaccctgaatttcccctctcacctcccaggggttaggagtgtgggcccacaccatcaggcttcctgcactcctccagggctccagcccacaggaagttgtctttctgtatgacttcattttgtgttgcttccactgctatttaaaagaacagcctttgaaatggacaatagagccgtgccagagcaaggtccctgtgaggggactacctctgggcagcctactctgaagttcagtgactcagctctccttacaatgactttgattgtggccacatcatgtatccagacatatctgtggcgtaacagcaggagacctggggtggggacttctccatctcaggctgacagcaaggtcttcatggctcctaatctttccctcttttgtttattccttccaggagagtctcatctcagagactgtagttttcatctctagaagttcaaatagattgcttttgtagctcccatacccttgtgtagcacatacatgagtgtgtgaatgcgtgtgcgtgtgtgcatgcgtgcgtaggtcagagaacaacctgtggagtggattttctcgattgaactcagatcatgaggcttggcagaaaactcccttctctgctaagcctctagcccaaacagcatgttcatctttcttctggtctctttgttgcattcattgtcctggagagaaatgaacaactaaatatctatttacccctgataagagagagcaggctaaaggaaacaatgctgttctggtcctgcttggtgacccaatgaaattattgcatttatttgtagaagtgtgggcagtttccaggatttgacactgtaaagtcacaccccagcatgggtaggactttgtgacaacatcactggagttccacgctcagtcaagcttccacctggggagagggtctggtgaccctgccccctgcactgctgttgcacagacatggctgccacactctgcagcatcacgttacccctctgtcgcactaggggggggttctgctggggacccattgcgggggggggggggcctctgctggggaccattatgttcatgttgggcctgcaggaaaatcttgactgtgcctttcctgcaagtgcagaatttcagatgttaacagtggtctttctggtttcctccgagaatgtgtttctctgctgctttgcatgctgggtaatttctggtcagacgctagatgctttgagatttagcatgttatatgataggtccttttgtgttcccatagtgttctgaaactgagttctggaatctgtgtttgtttcatgttttagcttcctttctttttggagggtgggggagggagggtctcacatagctcaggctggcctttaattctctatgcgactgagggtgatcttagctgcttccatctccagggtgctggaatcacagtcatgcctggtttatgtagtgtctgatcccagatctttgtgctctaggctaacacttccccaagccacaccggcaagttcaattctgggacctggtgtgggaatagttggattcacttgtatcttgcttttaaactccttagtgactgagtgacattcggtgtaaaactggcaaccccaagtgtgagctcagtgcttgggggagttagtccttctgatagtctaactggctgcagcatagttcttgctctggatctctgcaggtcgcctctaagtcacctcgtctccctccctgcatgtgctggtcagcccttatcacttgtgggggctcttcagatatccattgttctgtgtgactgtcctctctaggactctgctgatgaaccagtcagcctgctagcctccatctaacctctgtcctgcactgtggtctggaactttctccagagctgtaacctcagcaactgcaggtctcccctatttccctctggggtctcagggtcaccctccttttcttcgatggtcgaggtcagctgttccgagtagacttgagtttcttacatgagagggcagacctgcctcccacccattcatcttgttggaaaagggagagtacagctcagttcacccaaggaaagattatgggtcagaaccgtcctgtactttccagaggaaagccaaattagaaataaccaaggtagcagctcagctcaaaggtagtacacgcctttaatcccagcactccggaggcagaggcagacagatctttgagtttgaggcctggggtcctgcgtcctcagcttcctcagggagtccagatgcctctgtacaaccatctggaaggatgaaatgggagtctggaatgggcagcatcctgggtctgtttgagagcgaatttcttggggatagggagagagactctcttgggaccttagtgttacagctcttttaggtaaaaagatcttcaatgaaacagctctccgggatgatcttggcttgtgcgtatttccttctttggggtgggtttgtatgcatacactttactcagggtgaactaagggatacgtggtttggggaaggggatgagaccatccagagtgggcaaaggtcattggctgaaggctgctaagctgcctcactggcactgggaggcggtccaggagtctcagatgcaggactacctgacattccttaggaggggtccaggattccccctacccaccccctgaaaagaagccccatgacaaagggagtctgtcgttttgcattgagctcagggctgtctggttaacgtcagactttgatcttagcagcagggcaacatccagtctggtcttcagagcaagttccaggacagccagggctacacaagagaaaccctgtctcaaaacaaagtcatccaagaacccgaaaggttgaggggctggaggtcaaaggccagacacagtaagagactttgtctccaaaaattgaaagaaattttttttttttttttttttttttttggttttaaagaaccaaataaccagcacttagagggggaaagaaaggaagagaagtttggtaattatggcactggcctaagaacgaggtggtacatctcaggagtcatcaacctcacagtgtaacaccgcagggactccccactttccagggagcacctgctgtgcttgagcattcgggggcttgtgagggaccagtgtggggctgcggtgcggggctgcggtgcggggctgcgtggagctgcagggcctgtgtcttcagatctggaggctcacccggagcatgctgccctgtgggatcttggtccacagaggagtgggtctgcttatgatgccccaacaccacttggcttgaatgcctcagagtagttaattctgttttcagagtggcccagtgtgagaagaagacctttgaagacctcagtgagtggtcaatgtgttgcgaaggacctaaacccccgtgggaagggaaccagagttcccatatttcagggatttagtttgataagtagagaccctggctcccagcagccagccctggggtctgagggagcacgcactagctgcactgtggagcctcctttctgaggtccctgcaacataactatagcagtaccatctccctgtcctgaggaaggatggacaatggggcaatcaagagctcaagatgtgacttgctggtgacagccatgttgctccatcggctcaagaagcccctcacagcagcggcagcagtggctaaaggcttcaaaccagcctggcctgctcctctcttctctgcagccctggctagctgcagttgcagtgaggatgaaggatcccgtcctagggggctagccttgaatcctcctagactaggaagatccaagtgcagataaggaggaaggcatcttttagcccaaggcatgtccctccttctgggacagtcaacctcatttctgagatctggtcagctctgggatgaggaggaggctgtcagctgtgtgttcatggtggggagggtaggagtggtttgttctatcctgggcatctctagggaagaaacagagacaagtggcaggtgaagtggttctagctcaggaagtctcatatcacaaagggtgctccacccagagctcacgccttcctaaaggtggaaacccgaaagagcagagtgctgttggctgttttggggttcctggactaccttaagaccatcccactcaaaccaggcacctactgaggcttttgagttggttctagctttcagcactgccagggactaggaaaagataaatatgcttcttatggggctgaccaccatgggtggggcctcaaggagacagtagctgaataagtcaaatagccaaggacacaaagaggaacgcagcatgcctcttatccagctaggatactagagaggactaggaaggtggcccaaggggcttttgggagaggctttatgctcctacactgagacctttgggaggtgtggacaccaggagagttttgaggcccaatgagacagaagggaagcagacaatgcagccttggagccatcagggagtgaggcaagcgggacaaggaagggagagaggtcacagggcctggaaagagggacatggtcatccaaggtcccttcaaaccacagggagaggccaggctgcatctgtgatcgaggttttaagaccagctgtggcagcaagatggagcaggactgagatgtagctaggctcctgccttctagttgtcgccccttgcctagagtctccgatgctgccaatcctagacccccaaaccacgctgagcatctccatccagggcgttggtatgaacgacttctatttataagcggaaaggggataaagcagcaactgcagccttaactcgtctgtggaatgacctcttttagtccagacacagcaagagaagggtggacccaacagctgaggctgtggggctgctgccatcaggggcttagacacagcaagttatgtccacttgagccgaacaggtctggctctgggacaacgtgggcttgacaagtttgccaggtggccttgtccgcacaattccattttagacatgtttctttctctgggtgcgttatctttgagggcctggcatgttctgctccttgggctgtggagtcctgtgctaccaaagcctctgcagagaccatctgtcacctttcaggttcacaacatggcactgctctggactgggtcaagggcagagggaagagctgtgtgttggggtttgtcatactggaaaggttttggttcctttgttgttcaggggttgttcttgtttttgagacagggcttccctgtgtagctggctgtcctggaacttgctctgtagaccaggctggccttgaactcagagaactgcctacctctgtctcctgagtgctgggattaaaggcatgcccactaccaccttgctaagatgctgttttgtaatgctttaaggtcatggtgcagtcagtgtgactgtggtcctattggcttttgtgtcccccatgccacagcttgctcaggtgtgcccttatgtctcagccttggcctcagacagggagttcaagcctccatccatccttattcaggggaagaacatgaccatcagggatgggcgctcccccggagtgttcagtggcttcttatcatctcaagaggttcctaaccagccatcaccagagccaagacaagacctagaattaggcacagggtccacccggactgtcacccattctctgtaccacagagacttgtctgcatgctttactcattaggggctctgcctcttctgaggagctggagccttgagagcctcagtgtgggctccttttggtcctttgggaattgaagagccaggcaccgcttgaggcccctctgcccggaagcaggtctgtctctccatatgcttgaaactttgccgaccaggtctctcagaccaaggggactgcagttgtgatagggaagctcacaggaggtctatgtaactgggtaactagctctgttctgccttggcatgtcatcctgtctacccccacccagccaaggctttcatctgcccttgtattcccttacaggctcctttctatacatagaaggcagttcagcctaaacccttgacctcaaattctccacactaatcctccattgagacagcatttgacatcgctccataggccgtatcagctgtgctctgccagaaaacactccagcacttactgtcgtgcttagtgaggcacaggaggaatgtgctgctgctgtcagccccctctagctctttttttggggtggattacattgataggtggccaggtcgagccagcagctcagtgcatgtcccattgaagttcaggatgctgggctgggagggagctgggcttcatggagcttgaggaggagggagaaaacggatttttctaagctctctcatcatggtctgttttgctttcccagatgtaaaatgaagttagtgcttcaggtggtcacagtggtagaggccatcgtttggtttctcagagacagactcccattaagtccaggagctctttccctgtgcacacatgtgcacagtggctgaacctgtctcagggcttccctgctgccttgcttttgctatttcggcagcctccacagaagtttctgggtcaggtctccggcaccgcagggagggtgtggaccatggagaccaactaactcagcactgagcctcagcagctctggctagaattcagcctccagagtagtagtgaggggtaggatgctgcccagcaggtggccgggcctgagcaatgacagtacctgagagcacttgcattgagctagaactcagtggtggtgactgtcattcccatgtacaggactggatcttgtgacattgagtatgcttccacagattctcactttagggggaagtgtggactcctgacccatggtcagcagtatgccccccctcccccccataagcacacagggatttggtaagaggcgtaggtctgtgctcagaactgttccaagttgaggctctgatggggcagagctactgtgggccctccagcctgccttcagcatgcagggcgtcaggacaggtgtggtcggccagcctgaaaagctggccaacactaactgtgaaaggagtgagtccccaaggcatcctcactcccttggccatggttattgtggttggtgagttcctgtcattctagaattgtcaatgagagatgtgagtttaatattaagctttctcgggctcgtgagatggctcagtgggtaagagcacccgactgctcttccgaaggtcccgagttcaaatcccagcaaccacatggtggctcacaaccatctgtaacaagatctgacgccctcttctggagtgtctgaagacagctacagtgtacttacatataataaataaataaataaatctttaaaaaaaatattaagctttctctgggcacctactttataagatatatatataatctgatcacacaattgggtgtgtcacctcccctcacctctgtggctggctgaagtccactgacagcaggaagtacctacagaccctcttgcctgaaggaggaccccccccccgccccccgccacctgatctctgtcctgctgctttgtcaagtgtaacaactcaatgcttgaagcaggactatggcacccttggaaattacctcagttgaattttctcagttcactaactccttcatttccatttttaatctcagtcttcctcttcaggtaacaaaacgggctcttccctctctttacccagttatagtcctcatccatgaatgttccccatcaaacccagaaagcctggagcaagtgcctttcttcccagcacttgatatatatcggaaagggtggatcagagagtttgaagccagccagggctgcagagtgagaccctgacacaaaaagaagcctggcgatcccttggtctgagagacctggtcggcaaagttccaagcatacggagagacagacctgcttccgggcagaggggcctcaagcggtgcctggctcttcaattcccaaaggaccaaaaggaggccacactgaggctctcaaggctccagctcctcagaagaggcagagcccctaatgagtgaagcatgcagacaagtctctgtggcacagagaatgggtgacagtccgggtggaccctgtgcctaattctaggtcttgtcttggctctggtgatggctggttaggaacccagcagggcagattcctcttgagatgataagaagccactgaacactctgggggagcgcccatccctgatggtcatgttcttcccctgaataaggatggatggaggcttgaactccctgtctgaggccaaggctgagacataagggcacacctgagcaagctgtggcatgggggacacaaaagccaataggaccacagtcacactgactgcaccatgaccttaaagcattacaaaacagcatcttagcaaggtggtagtgggcatgcctttaatcccagcactcaggagacagaggtaggcagttctctgagttcaaggccagcctggtctacagagcaagttccaggacagccagctacacagggaagccctgtctcaaaaacaagaacaacccctgaacaacaaaggaaccaaaacctttccagtatgacaaaccccaacccacagctcttccctctgcccttgacccagtccagagcagtgccatgttgtgaacctgaaaggtgacagatggtctctgcagaggctttggtagcacaggactccacagcccaaggagcagaacatgccaggccctcaaagctaacgcacccagagaaagaagcatgtctaaaatggattcgcacactgtccaagcctgcagcgacttgttgatgtccccgtaagtcgtgggttccaaacagtgaaggaaggacgtggtgtttgtaggtctgcaaatgctgtgtatggagacgatcagcagactgcctctgcactgggaactggcagcagatgcagagcatgcaggagcagagacagggtggcaggtgacaggcagctcagcggctgcctccctggtctgtttgccatacctgtcttagaactggctgtgaaggaaggggccctcacaggagcctgacatggaaccacagaacatgtggcatagacattaacgtggggaggtgtctgccacattctgctcttttccatgtagaggggctctactcagaatgccactgggcagagaccactggcttggtttcctcaagccataggaatgtctctggctgtgacccaaataaatacccagatgttctgtgcagaaccagaccaaacactttaatagcagacgaaaaacttgatgtaaaatttgaaagcggggaacaggcagttagttaagcattgctgagctttggtctccagtgtttcttcctggctgagcgttttcatgagaaagttcttttgacagtctgttgctgtggagggatgcgcacaggagctcacaggaacttgagggaatgctgacatcagctcagcttctccagccaccgaagccctggacagacctgcaagaagtgcagagaggatcaacacacaagcctcgagttgggcctggagccttcagtagcaggcagctggagacaccaccacagaaatgaggcaagtgtctccacgccctgctgccgggaaggccaatcatctcttactcagcctcccgcaggccggcagccctaaacccaacacctgctgctaacctggctctttagcctggctctgcaaacagaaacagcacatcacacaagtccagcatggccgagacttccccctccctgggccatttgactgagttaagtgagggcagaccacagggcagacaagtacttacgagttagatgatccaaaggtgaaggctgaaacacagaaaggaggatgtcagagccgagagctgagggcctctcagctatgcaggctctgtcctgcttggctcctgacaagccttccccaacccaattctactaggtgactgagggtacagtcagcccctcctcactattttaggtcctcagctctggctgcaggtaacggtctgtgcactgctgccctgcatcatcttatgggacaacacaagtggtttcttttattgataattaatctgattcctttccttttgagagcagaaaggcagacactttaggtctggctcagatgccacacggggttctgagcatcagtcagcctctgcagccagttctgtatttgttaaaaaaaagtcacaactttgctgagctctgtgtgaggacaacacaggacacatatatttgctctctgaagatgcagagcactgtacagattagttctaaaattctaacagaaagtgaactcagtaatttctttgaatttttcagaaatggcacaatgttgccagtctatttaaccaatgttttttttttttttgtcacttcagtttttaagaccctgggctgagtgtccaggaacacctattcttctgtgggaggaaagaacacagctgtttacctcctgtgcccgatccaaacccagcgaatccactgctcggggtcccaaagcctgaggtctgctgggacaaggacccgaaggtgggtgcgttctgactggcgagggtaccgaaggatgcagtattgccgctgctcccgaacctgggtgcggtgagaatgggacagggttgtcatggccctagtcctcatgctgcccacacctcactcactgtcacctgtcttggatgtaccacacaggagctgtggtgacaagcttggaccgagtcaacagactcagaggaaaccggcttctagcccagagtaagcctttaccgtggctctgagaaggaagacatcagaaacatagtgtgagatccacctggggacctgagtccttagcactgactaactccaggtccctgagagcaaacacacttcccgctctcctcctggacaccctcactgagagcgacattctcatctcttcaccacctgcgtggcctcatccctgccagtccccctctgccttggcgactctatgttgcctatgctggcctcaaatactcctcctgcttcagcctcctgagggctggtttcacaagctagtgctgtggagtctggtgattccactccttctatcctttgctgggatgtgtgtcaccacacctggttacagtgcgaagtgcaagctaaggcttcctgagggctcagcacgcctcccactgagctgcatgcccagctctccactcactttttagtaagactacgtgtgtgtgatgtgtgtgcggatgctggcatgcgtgtgacagagtgtcatggtggtcagaggacaactgtagagaatacattctttccttccatcatggtttgaggcagcagctttcacggtgaggtgagtgcttttacttactaagcctatcggtggcctatctgctttaatgacttggtttaccaagggccccctgcatatgagatatgaagataagtcatcatgtttccctttcgtgtgtgtgtgaggggacactttacaagttatttcacgcagaattgtgtttcataaaaatcaataaatacacgaagcaacggagaaattttctctctcctgctacctcacctagaacaatcctcgttcaagggttctccttccagatttgcttgaccaaatggggttgaagatataacctaagacattttgaggggttcagtgggggtccccaagaggtcagggagagaggagttggtgtttcttggaaggagacaggataggctaaatgcctaagttacaaagggaagccaggcagtccatggcctcatacaccagggcctctctgcactgctcccaggtgtccagctgtccctgtgctcctactctagggctgacctgagatctctgtcagggttaggctaccaccagtgaccaggcacacaattgttttcccagagattgaatgtctgtgctggtacgttttactagccctagaaaatgtgccagtcagtcatgattactaagatattccgttctctcctctaacctcccatgcgtgtgggtcagcctaagtgacctagatattatatatatatatttatttattttttagtttttcgagacaggattcctctgtgtagccccctggctgtcctggaactcactctgtggatcaggctggcctcaaactcaagagatccgcctgcctctgcctcccaagtgctggggttaaaggcatgcaccaccactgcatgacaccaccttatttttacagacagggtttcactgagacctggggctgagactcagtgtctggcaagcctccaagacatgcctcctcagtatgggaaccccaaccacatgctgtcctgctcagctttttatgtgggtgctgggaattggactcaggtctttatgctttcgtggtatttattgactgaactatcttcccaattctattcattttttaaagatttatttattcatttcatatatgtgagtacactgttgatctcctcagacacaccagaagagggtgtcagatcccattacagatggttgtgagccaccatgttgttgctgggctttgaactcagggcctctggaagagcagtcaatgctcttaactgctgagccaactctccagccccccagctctattttaaattctttatcattactatttggcacagggtcttcctatgtagcctgtgctagcttcagagtctacaaccctacttcttcagcatcctcaataggtgcctgttacccatgtggagaaacgctagcactgtgaatgtggtgctggggactcacttaggaatgggagggcacccagtaagtccctaccatagagctacacttacaaccctcaagagacttctctgctagtaaagcaaacagctgctttcaagtaacttaacaaaaccttaagattcacagtgtatacagatggagtccatccagaactgtgtaaaacacaggcttagagcacttctcaactctcccttctggaagttctctttaactgttgttcttggagtttccccaaggataaatgaccaagattccttagcctgtacaagaaatctgaggcgtgcctgtcctcttgcatgctcttcctgaatgctctagcatccctctgtggagccgagtttgttaagaatgtgatctcttttcaggataaagccgctgctggctcatgtccaacacccatgttactcttccccttcagatccctgtcctgagctgagcactgaggatgagtccgtctgggtctactttaggcatcagtctctccttcagatgagggactctctgtagacttcaccacatatatatatatacttagttgagacggtacagtgccgcaaaggctacttcttggggttctggcaatgagactaaaattctagggccactagaagaaactcccccttctttttggtattttcatctttatttaatttttattttatatatgttgttgttttgcctgcatgtacatctgtatgagggtatcagatcttggagctacagacaattgtgagctgccatgtgggtgctaggatttgaacctgagtcccctggaacattggtcagtgcttttaactgctgagccatctctctagccccagtcatgggattttctaatgaggatgtgtgtaggatgtgtatagagcagctgttgacagccaagagaacagcagtcttgagtgggggttatcccattggtgtcctatgttctaggagttgtttgctaaagaccaactggcacctcaagaaaacaatcctaactctttcttcaggactttctaatataaggaccacctgagaaacagacctggctgcagctaaacctggtccagagaacaggttattgatgtcctgcatgctgtgcactgacagccagcaatgctgtggccaatgatttaagaacctgctcacaatgtgccttgtcctgagaaaaagacatctagcaactttttttgtctacttaaaggcaaggccgccaggtcactgtgtggtttagagaatgtaagaatgacaggccctggtgctttgggctggcacaagtttgtggttttcccaggtcccacctgcagcttacccgaatccgcctgcgctggcagccgcagtaccctctccgaacactttgcctcccgtcgagcccagagggcttgtaaaggctggggctgaaccgaatgctggcacccctccaaacccaggggatcccccaaaagtaggagggctgccaaacactggagcagcaccgaagccacctgagcaaaacagaggcaaacagaacagggagaaagaaaaggagacaggaaagaaggcatcaagcagtcagaaaccaaatcaaaagaggagaaagggagagaggacgtcagtaattccaacacaagaagccaaaaagcacaataccccaacctcaatccctcagccacacggctcctcccactaggagcagagggtctgtggcactaagagatctgagcaccctaatgcctccctgaggcaggtggaacctatctcaagtcctgttgagaacaaaccaccttaaacacagcaggtccattgcaggttgctttctagccccatgatatctgtgactcttcatagaaacccatccccaaagctagtgtctcaaccagcagtggcagggtgacaggctttactgtttactaatacacacagcaggctcctagtttcatgtccaaagggcatggctggagaagtgacccaagcccttggaggagcccagaagatcgtgagttggatcccagacattggacggttggagattgatttttgcttttgattgtgactgtgccctgatattttccctcttgaaggaagaaactgttttagtgatgcccacagttaagagacttttaatttaaaaagactttggatttttaaaagagatggatattttaaagagattgaaattttaagaatatgtaaagactaactaaacccagctaataaagtcggaggttcaaagccccttccctggcagaacccatgaactgggtcacaacagaagcagggtggtgcaggctggcacccagccacataccttttatttatttacaggcaagtggctgtgggcctatcaccaatgtccctgacttgtggcatgactataaagcgcactgactctcattttggatgaaggctacagtataaatgtgaccaggtgttaagatggctgtgaggatggcctaagcgcccagatcaggactctaggccattacaggcaagacggagacaacagaactgggtcaggtccagcaccaggcagcctcctgggactgttcctgaggtatccccaaacctccaagatttgctctagttctgaggttcagaagagaagggtagtgagggtatgctgagctcagattagaggcagggtcattactgctgacagcaaatctcctgttcaagtggcggatctgctttatcgtcctcacacccgctcctgccaccgtgatcagaagatcaaatgtagggcatgagagcagtcaggcgagcagcggctgctacttgcaattgaattctgtgtctatcgttcacagggctgcacagctgaggagacattgccgtggctcgtgtttgggttactactctgtcttttaaaaccttgagtgaaattccaggctgtgctacggagactggtggcttacaaacataaacagaatggaaaaaaagtgctaaaaaaccattgtcctttaattatttaaattgaccacagatctagttgcactttcttcctagacatacaaggttacatctcgcacctcgtattcaatattgtttagacttcttgctggaatgtgagcaaaaaaatgagaggttttatgacccaagaaattaacctggagaggagctggcaggagagccagcaaacagacaggcaggcacacgtgcaaaagcaaaacaaacttggtgtgtagctaaatgagagaatggctgctttggtgttagttctggggtcaggcgactccctccaatgagagagcaggagctcagctgcaggctgagtgtctgactgagcaaccaagaagcaggtttgctggccagacactccagtctctgggcttccaggggcggtggcagctgcatcaaggcagctcccaccctctcctggctggcctgggcccttcctccagtggtgccaagctctcagattaccttctcatctaactgcagcatgggtaggtggcagagctgggattggaacctctcatggccctgtcatgtgtcctgctttctaactgacgaagaaacgcctgcagaccccgggctggctggctgtgaggccatggtgaggttcgtctcctgtcccttctgtggtggcctccaatagcgttagctctgacacagtgttttctgaagggaggaggaacagacacgagttttcaaaggctcatccaaaggctctgcctgaaatcgcttttacagtgaggggctgatgctgctcctttgagctggaagtctgactgatcccctcacaggctcctgagcgcacgtactcccactgagtgcaccccagccttctgtccaagtccttcaatccaccttcaggacagtgctcactgagcgcgtgggcaagctgagtgcagggcagacattctcctctgtctgctcagatgcctgggtccctgtcagtcctcattctagatgctcaccaaatagaaaagccagaattaggaaaacaaatgtctaggtgggaggtatattttttctaagacagaaaacacattcaccagcttctcaatttaagtccaccaggacaatgtggaacacagagccacaccccagaacccagaacagaagaagtaaaggaaacatcaggtgcctaaaaagatagaaaggctcagtggttaacaatgtaacatttctcaagtgttcatgcttatttgatttccttgtgtacatgtcatgagctgtgtgggaggccactgatcaggagccacccagtttgttttttaagaaaggttgcacccccctccccaaaaaaagaagccgggcgtggtggtgcacacctttaatcccagcactggggaggcagaggcaggcggatttctgagttcgaggccagcctggtctacaaagtgagttccaggacagccagtgctatacagagaaaccctgccttgaaaaagaaaaaagaaaaaaaaaaaaagaaaggttgccaagtggccatgctgactgtcagtaccaccagctccaaacttgtccttgtattagagctaaaagctgtgtccttttcattttttaattattctgtatgtagcccccaaacgaagttgcaatgcctatttctagtaccttttaccaaattctaaggaaaagatgctaagaactagtaacctaggactcagttgtcaagccagggttttagaaagaaacacagcatgaatctaaaagccactgcacctcagggtcactttctaatctgggtcagccactccaagatcagcgtcacctcctcaggcagggaactattcaaaacaggccatccatccaagggcaaacagtactgcccactcccgaggaggacagattgctagaggctcggctccctttccagaggaccatcctgccccctcccaaaaccctcactccagtctcccaccaataagaccagcattgcaggcagtgacagactgcagacaggcaggtgacagaatttaacaatgtgtttcatggagcaggagagctggctcagcggttcagagcactaactgctcttctgaaggtcctgagttcaaatcctacaaccacatggtggctcacaaccatctgtaatgagatctgacgccctcttctggtgtgtctgaagatagctatggtgtatttataataataaataaatctttgggccagaacaagaggggccgcccagagcgagcagaggtcctaaattcaattcccagcaaccacatgatggctcacaaccatctgtatagctacagtgtactcatatacataaaataaaataaataaacttaaaaaaagaaaaacaacggctgctctttcaggacctaggttcgattcccacacccatgtagcagctcacaactatctgtaactccatttccaaggtatccagctccatgttctgacctccatgaacaccaggatccacacggttcacagatacacatgaaggcaaacattcccacacataaaataaacaaacatataacacatttcataataatgcaccttttaggacctttaatgaaaatgtataaaaattatttaaaattttatagatgtgtatttctagtaaaagattaaaaagggtggcccagacccatgatcccagtgtccaggaggttgagacaaagtatcatgaattcagggcagctttgcttgtacagggagatactacctcagagaaaacactcagacaaacgcctaaaccaatgacttgggatggaaaggcggcccagggacgagggcctgagccttcagcactgtgagacggactctgagaatattacattcttttaagtgctatattacatatctcctctttataaaagacatttgttttgttttgttttgtttttgcagacagggtctcattcatgagatcaggatgtcctcaaactcagagatctgcctgcctttgcctctggagagctgggattaaaggagtatgccaccacatctggtttctctctctctctctcctctttttaaaatttttttttcaaagatttattttatttatatgagtacactgtagttgggttcagacatactagtagagggttacagatggttgtgagccaccatgtggttgctgggaattgaattcaggacctctggaagaacagtcagtgctcttaaccgctgagccatctctccagcccagtttctctctctttttttaaaagcacgtcttatgtattagaaatgcagtagattctcaataaatataaaaatacactggagaacaaagtgacttcttactgtgatcccagccccttgagataagcacacaaggatgttgcctccaaaggggcaccttctataagctcacaagtcattcacacacgcacacagatgagcatggctcactcgcgggttacctgttttatttggagtggaaaatccaaaaccttgggatgctacgctcccaccgccagagctgaatgtgccggcaggcttctgttccccgaaggatgagctgccaaaccctccaaatgtcttagctccactgtttccaaacagattagaggtatctaaagggaacaagaacaggtgtgagggagcttgaataggagaagctcagaagacagaaaggagtcagatcagccgagtctctggacaggagcaatggcacagcccagcagagctgcagatgctgggtctgaaatcaccgacactcaggtgcaggtctcccagaggtcttggtccatccaccaagggcaaccagtgcttgcctcctgtgcttaaacgtctatacaacaaggccagatcacatctctctcatgtcaaactacaagactcagagtcagagcagggtgtggcccagcacagggctgccagcatgctggctgctgcttgggctgtgcagagtcctgccactgctctctgacccaaggaggagagaggcggggtcaggaataatccctaagtccttacagcgtttggatgactatgttttgttgaaaaaaaaaatttttttttaaaagtttatttatttaatgtatatgagtacatggtctctatcttcatgtacaccagaagagggcgtcagatctcattacagatggttgtgagccaccatgtggttgctgggaattgaactcaggacctctggaagagcagttggtgctttttaacagctgagccatctctccagcccccgttttgttgaaatttgtttacacccatgacaaggcagggagaagctgctatgggtaatggcgtgcgtgtacagtttatgtttttaaagctaatagcatttttaaaacgtcttcaccgtgaagaaatggtcaatgtttcaaaaacatttttccttggacatgtgtagacacacacacacacacatatatatacatacatacatatacatgtatatgtatatgtatgtatacacagacatcacatgatacccccatctcctactacagtcttctcagattgtctgtcttggtcatctagactgaagtgagctcagactctatcctatcattggtaggaagctgccaaagatttctgcatcagaacttaagctgcaaaagaaaagcagcttaagaatatttgatttgagatggatttcccgaccataacaaagttgggcatggggtggggctgtgaccacggtaatggagaaggcctctgtgacaggtgggcaggaaactcatggacttcaaccaggagaacagcagtgcttgtgagcatgggatgccagagtcaacagggagcaaggcagtcactgcagactggagaaggatgcagctcagctcttccagctcctgcctctcactagcctgcatggacttggtcctagggtttaataagaccctgatccctttacttaagaaatcataaaaaaccattaagaccaccagctgtctggtatggaggctgtttaacaaccacccacagagaggggagtcaggggtgctcactccctctcggtcaacactcttttcagctgac

SEQ ID NO: 1181 - DNA, 1062 bp, Mus musculus
gtctagctgggagctccccgacctccaggaaggaaagatcgaggccatcagtgactctgatggggtgaactatccctggtacggcaataccacggagacctgcacgattgtggggcccaccaagagggactccaagttcatcatcagcatgaacgataacttctaccccagcgtcacgtgggccgtgcccgtcagtgagagcaacgtggccaaactgaccaacatctaccgggaccagagcttcaccacgtggctggtggccaccaacacctccaccaatgatatgatcatcctgcagaccctgcactggcgcatgcagctgagcatcgaggtgaatcccaaccggcccctgggccagcgcgccaggctgcgggagcccattgcccaggaccagcctaaaatccttagcaagaatgagcccatcccgcccagtgccctggtcaagcccaacgccaacgatgcacaggtcctcatgtggagacccaagtacgggcagccactggtggtgatcccgcccaagcaccggtaacagccaggctgctgcgaggtgagactcaacgtagtaacaatattactgctcagaaggaaacccagatgccctgtcggtcattcagaaaaatacaaccattctaccttcttctgttgctgtggagggatgcgcacaggagctcacaggaacttgagggaatgctgacatcagctcagcttctccagccaccgaagccctggacagacctgcaagaagtgcagagaggatcaacacacaagcctcgagttgggcctggagccttcagtagcaggcagctggagacaccaccacagaaatgaggcaatttttaagaccctgggctgagtgtccaggaacacctattcttctgtgggaggaaagaacacagctgtttacctcctgtgcccgatccaaacccagcgaatccactgctcggggtcccaaagcctgaggtctgctgggacaaggacccgaaggtgggtgcgttctgactggcgagggtaccgaaggatgcagtattgccgctgctcccgaacctgggtgcggtgagaatg

SEQ ID NO: 1182 - protein, 126 aa, Mus musculus
MNDNFYPSVTWAVPVSESNVAKLTNIYRDQSFTTWLVATNTSTNDMIILQTLHWRMQLSIEVNPNRPLGQRARLREPIAQDQPKILSKNEPIPPSALVKPNANDAQVLMWRPKYGQPLVVIPPKHR

SEQ ID NO: 1183 - DNA, 38985 bp, Homo sapiens
gaggtctcactatattgcccaagctggtctcgaactcctgggctcaagtgatcctcctgcctcctcctcccaaagtgttgggattacaggcacgagccactgtgcctggcccccacaaacctttataagcacccaatatgggccgcacaatcccacttcccaagagactgagaattcattcattcattcatccatccattcattcattcaatgcttttattgatctcgtcctctcattgatctcgcagtctagttggggataccaggacacacatccacaaaataattagccaatttataaaagagtataattttaccaatagccttattttttcttactatcaaagtgttacatacttactgcaatagattcaacacacgcggttgatataggtttcatcctaccacccagtgttaacgtgagggtgatcaggatataaacggtttctcacttgtctcatttccaattactaaaatattttgcatcaaccaagcattactttattaattagaaaataatatatactaaataagctatatctctatatatcatatatatgcaacatacacaaaaatatgcatttaaaaattattattattattttttgagacaaggtctcactctgtcacccaggctgaaatgtagtggcatgatcttggctcactgcaatccctgtctcccgggttcaagtgattcttatgcctcagcctcccgagtagctgggactacaggtgcatgccaccacacccagctaatttttgtattttttggtagagacagggtttcaaccatgttggccaggctggtcttgaactcctgacttcaagtggtctgctgccttggcctcctaaagtgctgggattacagatgtaagccgctgcgcctggccccaaaatatgcattttaaacatgtgatgacattatacattcttctgaaaagcaacctatccttttcacttaacaatataaatctggccatgtttccatgacactctattatttttcaaaggctgcctggcattttgtcacatggatgggccagaatttatgtaaccaatcccctgttattggacatttcattgtttccattgtgtaactattcaaaaactactctagggtggctgtccttctgcatatatccctgtgctctaaagcaggatagaaacaagtagtcaaggccgggcgcagtggctcacgcctgtaatcccagcactttgggaggccgaggcgggtggatcatctgaggtcaggagttcaggaccagcctgaccaacatggtgaatcctggtctctactaaaaatacaaaattagctgggtgtggtggctaacgcctgtaatcccagctacttgggaggctgaggcatgagaattgcttgaactcaggaggcagaggttgcagtgagccaagatggcaccagtgcattctagcctgggcgacaagagcgaaactccgtctcaaaaaaagaaaaggccgggccagtggttcacgcctgtaatctcagcactttgggaggccgacgcaggtggatcaggactttgagaccagcctggccaatgtggtgaaaccccgtctctactaaaaattcaaaaatcagcagggcttggtggcgtgcacctgtaatctcagctactcaggaggctgaggcaggagaatcgcttgaacccgggaggcaaaggttgcagtgagccaagatcgcgtcattgtactccagcgcctggatgacaagagcgaaactccgtctcaattaaaaaaaaaaaagaaaaagaaaaaagaaacaagtagtcaaggtggggtggctgggaccatgctgggagggatccccatgggatctggtgggctagcccaaactacctactgtagcgtccagacatgggaggcaggatggggccacagacactcgcggttgacaagccaagtccaaccaccctcttcccatgttagaggaacaagtgcaggcccagagtggtgacatcacttgtgaggccacacagctagccagggccagagctgggacttaggcaggccagtccctctgactctgagcctgtgagctgtcctcctggccacgtgtcccacagcttctctgttccctgcctgcttggcctcgtctgtcactcattcacttactcattcagtttcattcattcactcaccaacacttttttttctttttgagacagggtctcgcactgttgcccaggctggagtgcagtggcatgatcttggctcactgcaacctccaactcccaggcttaagtgatcctcccacctcagcctcccaagtagctgggactatagacgcatgccaccacgcccggttaatttttctgctttttgtagaaatggagtttcaccatgttgttcaggctggtcttgcattcatgagctcaagcaatctgcccaccttggcctcccaaagtgctgggattacaggcattggccaccgcacccagccttcaccaacacttcttgaagccacaatgtgccaggccccatggacggaccaatgagaagagcaaagatgaccttggtggccctgtccccttagaccagtagacgtcccaggagccttgctccacctgggccttgttccaaatatcgattgctgagaggtgggctgggagtgaattgatttgccagggcccacagctggtacaaggattcagacccaaagctcagcctaaatccctaaccatctgacaatactacttctctctcacttgacagcaggagttttctggcagcttttggtacctagagcagtttggacattgcagacacttgttttctgtctttaagagtttaagatagttaccataaatacaaacatgcatatttacccctggcttatacctaacccttgctatgcctgtgccaggcttggagtagagtttacgccctacatcacccagtgtaaccagcacagacacttcacagacagggcttttcacgccctgcacacaaaggggaaaacaagctcagagttgagggatctagccaggccactgcatgaaccagcagggagccccaagtcaaatctcaccccccaccccttgccctcttccctcttctgctctctgctgttttcttgtttgtttttttgagacagggtctcgctctttcacccaggctggaattaagtggcgtgatctcagctcactgtaacctccgcctcccaggttcaagcgattctcctgcctcagcctcccgagtagctgagactacaggtgtgcaccaccacgcctggctaattttttgtatttttagtagagatggggtttcgtcatgttgcccaggctggtctcaaactcctgagcccaggcaatctgctcgctttggcctcccaaagtgctgggatcacaggtgtgagccaccacgcccagccttctttttttttttttaagcccatatccctttcggacgcagcatagcctcacctctttattctgtgagtgtttggggttctgtgtcctgctaggaaaaggctagtcccccggggcggggactgtcgtctatttgttcactggtgggacccaggtgctcaggcagtgcctggctcatagtagaaacaacttccaagccgggctcgaacctgctacacacctggtcatcaaagatggccagtgggacactgttaggggactattgtgacactattgggggactgacggcagaaaggaaggggagggagtgggtgagaagctccactctgggtggggccaacggcctggcagctgcaggggagaggagggagggtccgccgcgggctcccctgccaggagggcgagggagccccgcggaaagcatttttcacccccgcctcccgcccggatcgctttctcagttcgcatttctaaggccgctcctgggttattttggtcgggaaacctgatccttcgctgggtttattttagcaccttggagaactcccagtcccgcacccgatcccaggccgccccctccgtccttccccggcggcggggggcgggggaccgcggggcgtgttggtgggcggcgcgcccctggcccggccggggttgcccgcgtccccccactggcatctcctgctcgtgggcttctgacctctcggacggaggctgctgggtgggactggtggtgagcgggtgcagaggggcggcgtcggggtgggcggggcggtgctgagcgcgctgcagctccgcggtgccggcgttgggctgcctgagcctccggacctgggctgggagactgtgcgttctgacgcgcgccccgggcggggaagaccttaggcgctcagggcggtggctggaggctcctagaaacctccaggaggatggggaagcccggccagagggggagtggagggtgttgcgggggttcggggggcggagtgcgaggccaggagccctacctgggaccctcggtgggcagcgagggacagtccctactcgccccttcctgatctcgattcagcctcagtgactcggactcagccccacactcacacccaacacacccgcatgtgcagacacacttgcacactcacactcatgcacacccacagatgtgctcaccacacaatccagttcacacccacacccacacagacacacagacacatggcctcatccacagacacacatggacccaaacacacaaccagaacacacacttaaacacatccttacacccccactttcatcccctcacacaatacacacacggttatacacaacttgcacgcacgtgcccatcaacacccataccacatatgctcattcacaccattacacaccccatacacacatggacacacacccacatggcatgcaggcacatacacttacaagatggacacactcatacacacccacagtcaccaacaactgtcaaatatagcctcacacgcagagatgcacactcacatcatcacgcagagatgcacatgcccccacacgccctatcccactgcacacacaccccacagcctcacaacccacagccctggtgcacgcacccttcctccagctcagcagcagacacacacatcgaaacaactgaccgacatacctcctgatttatagccatcgatgcttactcataaccattttgagcatcagtctgtacctatttattattgatgataatcaataccctcattcatggctcctggcattatccccgacatctcagggaaggggatgtgagtgctgttgtctgggcctggctgtgactcctccgctatatcttctcagtgcctggcccggcggacgtgtccggtccacactggggaaggaatgagctggaacagtgggcaggtgccccaagcctaacttgccctataagccatgtggttctgagcttcggctgaaaaggccccagcctccagatttgcagccagcacaggcagcggtttcaatcccttgtcccatgccctgccatacccatgcggcaccatggccctcagtggagagtgacgctctcactgagtgcagggccagaagacccgggttctagtgaaggaagcctccctggaggacttcactgggcctctgttccccacctgtaggggaggctgctggaccagctctctctgagatcttgtccctactcccctggccaggctcagcctgccccctgtcccagttaggcaggtcagggatgcagacatgccctacgcctccatctgccacctagcctctcaatgtctcccaccttcagacacctgtttggctctttggccccacccacctccctggtggacattccaagcttcgtcattggctttcggtctggtccccaacagttggggagagaacgctgtctcccagggcaacagaattccagcaccgaacatttccatctgcagaacaaaaacttttccctctcttgagattcctttttggcctctgatgaccccagccttgaaggtggcaagcccttggaggacccgctgaaactctgaatgcagagtggtccatgagagagaaagagccttgggactgtctctggtggccactgaaaacaaggtccctatactgcaaggaatgctggtgagagcgcccactatatcccagtcatccagcctctgggtcttagagccaggccccctggttccatccacccctccctcttcaccaggcctcagtgtcctcatctgtagaatgggatgatgacagggtcgggtcaacccctgatccctgggtttctctggatcagttctgggatcattgtggaaagccatgaagatgctgtgtgcaaagccccagctcacggtgatgcctgcaaggagacactgcagcagtctcttttccaaagacttcccaggtccctgcagcttggcagggtcagtgttgtttctacttctgacttgctgtgtggctttgggttttcatgacttctctgggccaatgtgccaggaattgaggaccttgtcctcccactgacaacactttgagctcccaagtggccatcccagtgttcaccatcccgggtgggggatggggccgtgtctccccacccctcctctttctcatttttcagagtccagggagcctgaggcctgggggaggggaaagggtcctgagagcaatgggagtgccctgtgctgttgggcaatgactcaaacagatgtccccttcctctgctctgcagacaccggcacttcacacgcgcgtggatgcgtcatgagccttccacatatgctgaggctgccgtgggtctgtgcccaacacccacggagctccggaaaatgacgagcaggaggaagggctgtgtagggaagcggcagggccggaggggccgcgagctggggaagccaccagaaccctggtgggcgcttcagaagccagggcagggagtgcatgcaggagccgagcccattcacaccctctgcctggcagagctgccccccagctcaaagccggcaaacaggcccatggactgatgcttcctggtcccttctcctgcagactgagatgacatcctgtgcaggggtgatgtcaagggggagcaggttaagggagaggggtcttctactttgcaagtcctcaccatgtgggcgcccacacacctctgctggtaggacttcctagtgatcagtcccatcctagttctgaggggctggccctggctagcaagtggggtgtgcttggtgaagaagctgaatgtgggctttggagctggtcagatcggagctggcatccagcctctgagaagtctctatcccctgatccctgggtttttgggtttctctatctgtggagcccactgcctagggctaaggtcaaggatagaagagacagtgcctgctcaatgtaacgcctgacacacagtgggtgctttacaaacccaggcggagcccaggacggagggggcggggcactgtcactcccagctggccttgaagagagcccacccccgggaaatcacctccagcagcttcactgctcacaaggcggttcagggctctggtccctgtcctttccacgagagggacgtgcagctctggccctgttcattgagcacttgaacttgtcacctcatttccaggatagcattcctaccctcacagagcaccctggccaggctgtcggggtgatgagagtcgggaaatgaaacagacatctcaaaagtgaatatcgtccctacatataaactgggtagtgcagtaattatctgatggcacaagaggtgcagaaggccctgtgactgtcagagggacagaaggttttgtgggggccattagttcatggaagggagaggccatttcacatggtgaagaggccagagaagacttcttcctggaaatggacatttatgtagagccctgatgtaatctgtgtgctgtctggggttctactgtgtccaacaggccaagggggccatctctgtggccctgccttggcccgagtcagtgggactaggaataagccacctactagctgaactggaaagggaccacctcctcattagctggggatacgggccatagcagtgctggggtgagggtgtggctgggtgagaggcggaggccaccctagccagccacttcctgctccatggctgagccggtgctgctgtgagatgtcctggttgttaacccctcaaaggagagatccaagagtggccagcccctcggtccctccagccctgccctcacacactcagcgtgctccggctctgggactggctggaagcacctgccctgtgccggctgtgggcacctgtggaagtcagagtcatggggatggggtggggacgaagagcgtggctttaatgtagctgccagatgtacttatgtcacaaattgcttgggctttccctacggctggctggaaggtaggggtggggttcatagctctcccatggctgtacagcctcatgctccttttgagcccctgcactgggacccctgcggggggacggggggaaggaccttgggcaaatcccctagcctctcagctctgggtgcctgctctgtgaagtgcacatcatcagtctccctccacagggaggccgatggtggctgaaatgatgctctgtacagcgctcatcacacagccggggtccaacaggcagccagcagacctgctcgaggggacccacctctccccaaactgctctcccctccccgcgaccttcccagccttggagcctacaaagcccccgcgctgtctccaccaagccactgtctccctgcggtcaggaaccccagggcaagggagcccttctgcgggtgctccgaaccccagaaagcctctggtccatagagttcaaagggcactgggagcagcccacctggccccgagacagcagcggaactacactacccagaattcccggggctggccaaaaaggaaatgtcgtttgttcaaggagaggctcagctccccgagcagctgcagagacagggagcgagggggagcgagggattaccagggggagggcgggctgtgtgcggggagcgagggtggagagccaggcgggcggggaggaggaggcggcgcccgcccgccgccgccgccgccgcctgcggacctgcatccccgcggggccggcgagcgggcggcggtccctgcgtgcgccggctgcgctcggccggcggcggcggcgagcggacgcgggggccgggccggcgcaggggccgagtttctgcaaagtttgacccggttgcctttccgatgctgcagcagagcgaggcagcgcggggcgcgccaggcggcagcggcgcggcggcggggctgagcggcgacagcgcgctcacaatgatcataaaataaaggaggcgcgcggggtgggggcgagagagccccgagcctcagccctccgcccccggccgcccccccgaagccccaagccgggaggagggtgggggccgggggcgcccacgccggccccagactccagtagagccaagggacagtgcccggggaagggggtgggggcgccccaagaacgtgcccgcggccgggtcaggggcgtccggagagcggctgcccgggccagcggagtggcccccggggcaggtgagtcggcggcgccgcccgagtgggggcgtgcgcgccaaagttccccggcagcggcgagcgcgcccgacgcgtggggacccggggctgctcgcggctggagaggggcgacagaggcgcttgacgcggcggagcgggggcactatgccctccgagggccgagggaccccagccgggaaaggggtgcccgccggatccgacggcactggtgggtggccctgcgcccagggagccggagggaccggggtggggaaggggcacctggcgctggcggcgcggcggtggggacagagcagggcaagtgctcgccgccccctgcagcggcagccgctcgccccccaccccgcccgtccgggacggtatcagcggagatgtcacgggcggctattattcgctggtgcgcgcggtcgtgcggccgccactgacggggcgggcgcggggggcgggggccaccgcctccggggagaccgcccagagctgcgccgtcagctccgcagcccgcgcccagcgcacacgcgtcgccgcccccgcgcgccccccgcagcaaagttcggcttaactttgaggctggccttgacgcgctgtcccttccacctcccaccaggtcctcggcggccgcggcgaagcaggcggcggcggccggagcgcagccccgggaccctgcacggcggccggcagcgacagcggcgaagggacgcggcgcccctgcgtggggacgtccggcccgcgcccgcgagtgggcgccgacggggacccgcgccgcgctcccccgtcaccggcgagcggccggagccctgagctcgcctcctggaagccgcgggtcggcgctcgccccgagggcgccgggacctcggccgggtgaacacaaactgctctgcaattgattcgaccgcgccgggcgggtgcgggtgcggggcccggagggagcgcgtgcggaaggccggagggcaggaagtcaggcttctgccgcgagggtggcgcggccgcgcggggacagagccttccttatttatgagtctgccggcgctcgcctgcttcctccgaagacttcagggagagtctgcgagctgccgtccccgcgtgtgaggcacagaagggctggatgtcagaaccgcataattattcattaaactacaaactttttttaacccaaagaatatcggtgatttttgtccactgcgaggagaagaagagagagcccagggctcatgaaatgcagcagaatccttatttataaacaggccgcggtagtgatatatgcaaccccagtctactcagtgagttttctatcctatggatatcggtcttgagagttgagattggagagcagcgccgtctgtactgggtcctgcagcctctgtcctttcaatgcctggttttttctgtgactgctggccttccctggagatcagagcgctcctgtatgccatgggctgtattcagagcatcggaggcaaagccagagtcttccgggaagggatcacggtgattgatgtgaaagcctccatcgaccccgtccccactagcatcgatgagtcctccagcgtggtgctccgctaccggacaccccacttccgggcctcggcccaggtggtcatgccgcccatccccaagaaggagacttgggtagttggctggatccaggcgtgcagccacatggagttctacaaccagtacggcgagcagggcatgtgagtacggccgagagccagctctgggaactgctagggatggccgagcttggaggcctggtggggggccgcggatagggggaaggtggagataccatgaagacaggacggaggccagagggaagctttaggcaggtatgcaggtggcctcattggcccggtggctccctgaaaagtttgcctgtggatccagattggagtcacggtcctgcaatctaccctgccactgttccccccgggttcctgtgtccttccctgcaagatgccgagaaagcagagagacattactcccagtgtttcctggcagagcaagtgtgccgtccgcctgaggagtgtctgtgccatcaggggtcaccagagaggctgcagggctgccctccaggcctctggccctgtgcgggcccatggcagacattcaggcactctgcaactcccagaccggtgtgttcagggctttgcgattgggcctcaattatctttctggcttttaccagtgtatgccaggagctgggggagtgcttccccgttccaaacggcactgtgtttgagagcacagttagttttagaagcccgatttcttcacagtgtatcgctttctgtctccaaggcagaagaccgctttatgcagacaagtccagtgtccctctggcgaggccctaacaggaacagcaaagaggagcctctcctctgcagccccaaagcccggtctccagagtgtgcctagggtattgggggtcccggtgaggaccctgggaccctggggctcctttcctggcctgcttcctgaccccagagaaggccgtccccagggtgaaaagagctgcatttaggcagagttgggagagtgacttaatctgaaggttcaccctaagacagggatggtgaaaatagctgtttctgagcgtaaggaccctttggagagagctaggcaggccccggcgggcagcccacccatgcggccccgtgactggccgctgacactcccagaacctctctcagtgtctaccctgtggccccgtgactggccgctgacactcccagagcctctctcagtgtctaccctgtgcagcttcacgtccccgttttgcaagtggggaaaagaggagaatttccccaggagctggaacttatcacagatttaagaatctcatgggccacctgtaaatgagaggggtggaggatggcgggacaccaagtctggtggcttctctacttaatgactccaaagttctaaaggaaacatgaggatcacagtaacccttaagtccagcgtgtgacagtgactgtcccaaagaggtacatggggggcacatctagaggctctcaccggccctctccaccagcctgatttctgtgccaacccctttgtgtctcaagagcagctagtaatccagttcgggggagggggtgctgcctttctgttctaagcagggaaacatgattcttagttatgcagtgaggaccttttctaagaacgcttaagcccagaaacctcctcgggctttgaaggcatcgggacagttgtagaaacaaaagttttcctcggggttttgggctaagcctagtttcttccctggaaggggtaaggaagccagtgggttcttctgaacttggaaagacatgagcactcacgggactggatgctaatgtggttggtgcaacgtgtggtggggaggccacaggcctgacccaaggtacagactccaagcctcagcttccccatctgtgcacatgggcttccgatgtcttgtctaagacttgttctccatctggtgaccctgagtaggtgtgggtgatgtggctggagctaggcctgagactgggacctgagacaaccctgccctccctgtcgcagtcctggcttcctggttggaagagcctcatgccttcttaggcagatctgggcgggaggccaggttctgccactctccaggatgtggccctaggcaagtccctttactgctctgaccctcagtttacacatctgcaaactggggctggcaagaaccccttccccatggcttattgtgagaatcactcaagctaaccaaattcgccatgcagtcagccctgcgccaagctggtggtgaatacttaccgcaggcagtaatgggatggggatcatccttagcggtgttgtgattgttactgttattctatcagatgtgagtggctaaaactacagaattaggacagatgtcagccacaccgtgtagtgaattttctccccaggccgagtctttctctgtcacgtagggcccacttcctgagtttaaaactttttaaagcagtgtaaggcatgaagaacttgcgttttaaagtggctccaggccattttccttgttctctctctgcccctgatgtttctctttgctccctctcgctctcgggactcctcttttgctgcagggagcctctgtgtcccacccagctcattctccctgggtgcactggctgtgcaatcccggttgggatacacggggaccagccccagggacaggatggagtcagaagcttcctgggaggggcggcttggagcagtcgggcagaagggtccacgtgtcttggctcctaggccttggccaggcagcccccggggttccgtttggtgtccgtccatgagggggagaacttcccgtaggctgctgtgaggattcagcgagaggccagtatgggtgaccgtcctgtggctgagacgtagaggaggaggctgccgagtacttggtagtaatcaacagaatcatcctaaggggccgagttaccaaagaacagagtcccggattcaacctgcacccttgaagggctcatggagaaggccaggatgcggccttgctttagctccttgctgaatggaaatagaagcatttaggtgggatttagttatcttttttttaatttttatttatttttatttatttatttttgagacagagtcttattcttgtcgcccaggctggagtgcaatggtgccaatcttggctcactacaacctctgcctcccgggttcaagtgattctccggctccagcctccagagtagctgggattacaggcatgcgccaccatgcccagctaatttttatatttttagtagagacggggtttcaccgcgttggccaggatggtctcgaactcctgacctcaggtgatctgcctgccttggcctcccaaagggctgggattacaggtgtgagccttgggtgggatttaaaacccccttcctgtctcccctgccccaggcctcctgtgatgacttccattttccaagtttttaagccttgtggcatgaaaaggaaagggaacagtggttggggtgaccagaaaccccaaccagcccagaattgttcctctgctctgcctggcccagggtcaggtaattctgtctgtgctggtggggggtgtcctgtgcatggtagggggctgggcagcatccctggcctctacccactccatgccaggagcacatccccgcaagctgtgacagtcaataatgtccccagggagggcctgatgtccccaggaggggctatgaaatcacacctagtggagaaccactggacttgacccagacaattcacatccttaaaatgaaacccaggccctgtgctttagtggcccggggaagggacagctaggtagcgagagctaggttagggctttcattctttacaaatgggcttgtatccaaaatgttaattccaaatacttaaccaaaatccataatacccccaaacgttatccctgcttaaaattaatccctaagccaagaggataactttttagaatgacattctgggtttgaaatatttgaaatggaacaattaaaaaaaaaaaccaccatctcaataataccctgacttttgcagacagagctggaaaagagtgagtttctctgtgccagcatgagaggattctatatggctttgggtccaacccacattgctttaaaagccaaccccccccatccaaattgttggagacacctgcctccacagcccggcccccgcaattcctcaactgccacctgtcagctggcacagagtcttctaagtgacaagtcacaatttctcgcctgtgtgggagaagttccacgttgtccctggtttgcccttctctggagccccctgggaacctggcccacagccacgcccatggccaaggccaaggtcaggggcagtttatggctcaggattctgccaaagggcagactgggcggggaggagggggagcagctcagatagaaagggtttctttgggtggatggggacactaccccatgcccatgtatggcagggtgtgaactccagctcccaacccttgggccagcctcttaacctttccaagcctcactgttcccatctatgacatgggaatatgagtcttctctcataggcttgtgatgataagaccttagcccagcacctcacgaataccaggcactcaatatatggtagccgtcaataccatagctatgaatcgtaatactaataatgtcttatgcattatgcgatgcctgtcggagtcaccggaaaggtggctgcctcgttgctgttgttacattatcccttctcctgggtttcagatacctgtctatagcatgagtgctgtcactgtgttatgaacggccagtggtcagcctggactacacagtgaaaccttgtccctacaaaaaatacaaaaaaattagccaggcatggtggcatgtgcctgtagtcccagttacttgggaggctgaggtgggaggatcacctgagtctggggaggtcaaggctgcaagtgagctgtgattgcaccactgcactccagctggggcaacagagtgagaccacatctcaaaaaaaaaaaaaaaaaaaaaagactggtgggaaaggacagggcaggggtggagggaccgctgggtgccaccctgtcctgctgggatgacgctgagaatggctgcctcgggcgccttcccacctgccgtctcccagcgtcctccccaggagctcaggaaggcctcattttatgatgtggtcacagcttctaagacctgaagctggttgccagagcagtgttgctcagcgccagcagatctggggacaggccatggaggaatgtccctgttgaccacgtggcctcttcctgaagccggggtctgagcgtcagttgtgcaaagaacaattgaggaggaggcttcctctctgtaaccggaaggcggcctcccccatctgctgggccctggcggaggcaagggcggggtgggtgggagagggaagtccttgtttcaaggctttggggtgggaggaagtaggggggatgacccagcctaaagagagctcccccaggaccagccctggccaagggattgctgcagccctcatccaccttccaagcactggaaacaaacattggagaccaagtgaggcgtcactcaacagccgtagtaatcagggaaatgacaagttacatactgatatcctttgttttgctgattggagttgggtgcattgaaaaagatcagtcgtgcccagtgtttgggggaaggaagcgtcttcacctgttgtttgtgggaggacagttgaggcaggtgaggatgctgagaggtgagctcagctgtgcctgttaccgtccacatgtgcaagcccttcagctcggtggttgtacttgtttttgagatgcagtttcactcttgtcacccaggctggagtgcagtggcatgatcttggctcactgcaacatccgcctcccgggttcaagcgattctcctgtctctgcctcccaagtagctgggattacaggtgcctgccaccacacctggctttttttttttttttttttttttattttagtagggatggggtttcaccatgctgaccaggctggtctcaaattcctgacctcaagtgatctgcctgcctcggcctcccaaagtcctgggattacaggtgtgagccactgtgcccggcctgtacttttagagcctcttgtagaaactttgtgcccctagctcagggcctgcatattggaggcaaaaaaataatctactgaacaagtgagttaatgatcacgcgaaggggagaagcagcacataaagatgcacatgggctgggcccggtggctcacgcctataatcccagcattttgggaggctgaggcaggtggatcatctgaggtcaggagttcgagaccagcctggccaacatggcgaaaccctgtctctactaaaaatacaaaaattagctgggtgtggtggtgcgtgcctttaatcccagctactcagaaggctgaggtgcaagaattgcttgaacctgggaggtggaggttaccgtgagccgagatcacgccactgcactccagcctaggcaacagagctagactgtctcaaaaaaaaaaaaatgcacacgtgaggatgttaactccagcacggctcctaatagcaaaaagccaggaacaactcaagtgtcccctcaagagggagtgaaattatgctctgcctgcagtgcagactctgaggcagggccataggcgatgaagacaagtggggaaatgatacattgttgttacatttttgtttaaagttatcaaacaatatgtagggtagtaacccatttttgttaaaaagaaaatactgaagttgggaacatatcctgtgtgtgtatgcagagagcaaggtctcaaaggatgtttaccagagtacatggggcacatggggaggggcgcatggggaggtaggtttcagttttcacttgatacacttcttttttttttttttttttttgagacgaagttttgttcttgtcgcccaggctggagtgcagtggtgctatctcggctcattgcaacctctgcctctcggggtttcaccatgttagtcaggctggttttgaactgacctcaagcaatccaccttcctctggctcccaaagtgctgggattacaggcatgagccaccgcgctcggcctaagagcacttctttttttttttttgagacggagtctcgctctgtcgcccaggctggagtgcaggggcgccatctcggctcactgcaagctccgcctcccgggttcaagtgattctcctgcctcagcctcccgagtagctgggactacaggcacctgccaccatgcccggctaatttttttgtatttttagtagagacggggtttcacccgtctctgtctcgatctcctgaccttgtgatccgcccgcctcggcctcccgaagtgctgggattacaggagtgagccactgtgcctggccaagcacttcttttataactaaaattaaacaggcgctgttggtctttcctccccttgtgagatcccagtgatccacagctgtgcctgggttaaggggagtggggttggcagggagaaggtgtctgggtcccagaaggaatggggtttgttgtggtgggggaatccccgtgggcaggccctgtgggaggcgagacctccagcccctccctcagctggtgagcaggtactggggaggccaggagagcagggcctggtgacccggtggtggtggggacagcccaggggggcggcagtgcgggggggatgtcaggaacccaggatgcctgtccagtgtggaatgggggctcttgggcattcgtttctgtaaaattgtaaagcttttacagaatgagtactttctgcaaattttatcagattataaaatccatactgttggggagtaggtaaaataattcctaacttcctgcccagcctgtgtgagggactgaaaccaggactgagcgggagactgtgtgacatgggcagatccttgccctggagcctcaagtctttttttttttttttttttgagacagagtctcactctgtcgcccaggctggagtgcagtggcgccatctcggctcactgcaagctccgcctcccgggttcatgccattctcctgcctcaacctcccaagtagctgggactacaggtgcctgccaccacgcccagctaattttttttaaaatatatttttagtagagacggggtttcaccgtgttagccaggatggtctcgatctcctgaccttgtgatctgcccgcctcagcctcccaaagtgctgggattacaggcgtgagccaccgcgcccggcctggagcctcaagtctttatctgtaaaggtgtttcttaaggtgcccaatgtgagccacttgtaggaggtgggataatatttgagtaaatcatttaaggttaaggctaaattttattttaatgcaacatatttattgcctattagaacatatatctgtatatctgtatatatagcatatccaacctgttatttcaaagttgtttctaaatttagttgattttgtttctttcagagacagggtatcactctgttgtccaggctggagtgctgtggtgcaatcctagctcactgcagccttgacctcctgattgctcaagcaatcctcccaccttagcttctcgagtagctgggagtatagggacgcaccaccatgcctggctaatttttaagtttttcgtacaggcgagggtctcttgctttgatgccctggctggtcttgacctcctgggttcaagcgatgccccctcacctccagcctcagactcccatagttgagtcttttaaaaggtgatcaggccaggcacggtggctcatctcaacagcttgcgaggctgaggtgagaggatcgcttaggttccattagaggctggtggggtaagagctgggtcaggttggggaccttggcccagttacttcccagttgtgtgaccttggacccggcctctcactgccgtaagtctcctctgttaaatgctccccacagccccggccccagggaggtgtggtgcctggcgcagcccgtgtgctcagggagtggtacctgctgtcaccgcgtgctaaggtgactgtccaacaagaggcttttgcagctgcagccctgcaggataagcagaagctcagggcaactttgggggccctggactcctcacagagatgccctgtgggcttcgagggagacccagcgtgcactgacagccactgatcctggccacagacattatggtgcctgaagctgggccaggtgctgtgatacatcccagatatgtggtgatgggcgaggcaggcctggccctgccctcacggcctcgtggtctgtctagggtagagactggcagcagatgagtgcatcagtatttaatcaccctcatgaacaggccacggggcagtgggatgagatccagtggcgttgaatagcaggaggcacctggcccatgtggagggtccaggcaggcttctttggggtggtggctgcagagctgagtgatgagcagctatgagagaggagaggaggaggaagtgggggggaggaggaggaaagaggagtggaggaggaggaggatgaggatgaggacgaggatgacgctgctcccggtagaaggccctgagagggaggagcatggcccactgcagcagctgagaatggctggggccctggagcccagggagggcgtgtgtgtacatgcacgtgtgtgtgcttgtgctgtgcacgtgtgcacacacgcagggctctaggcttcaattgcgtcggttttaagggcataggggagtcatggccggtttaacagggttggagccatgccatcggatttgtgtttttagaagatccttcgggctgcttctgggaggggaacagattgcaggaggctgggagaccagggaggggtaaggccacggtggaggcagaggaggagaaggggcacagcctggaggggcgagggagagtccaggatggcgctgtgtcccggagacacaggcctccccgttgccagccaggccagtggctctgtccacccatgtcagggcttcgtgagacatggaaagcaggtgccctgcagatgtttgttgggtgggtgatgatgggactcaggacagggacgctgcgggaggctgaggaagccacttcagcccgggaagcattctgacgcctgggttccagcctggacttgcctgctgtcctttggggtccctaggaggatgggagtgtgacaggtggctctgcctgcctctgcccacagccatggaggtgaacggcctgctgggctcctagactggacagctgtccggggcctgcactcagaagggccctgagcgtggttcaaggctctgccgtctcagcattgaaaatctcaggttgtttacagccaggtgcggtggctcacgcctgtaatcccagcactttgggaggccgaggcgggcagtcacctgaggtcaggggtttgagaccagcctggccaacatggtgaaactccgtctctactaaaaaaatataaaaattaggccgggcatggtggctcacgcctgtaatcccagcactgtgagaggctgaggtgggtgggttacctgaggtcaggagttcgagaccaacctgaataacacggtgaaaccccatctctactaaataattagtccggcatggtggcacatgcctgtaatcccagctacttgggaagctgaggcaggagaatcgcttgaacccaggaggcagaggttgcagtgagctgagatcatgccattgcactccggcctggccaggaagagtgaaactctgtctcaaaaaaaaggagaaaggtggttaagatattgcttaactttagacttttaagttaaaaataatcggaaaatttcaaggacaactactaagagaacagaattagaatgtttaaatccccaataagtaccaagaagaaacagaagaaaaataccaataaaatctgtaatcaaaagaatggtggacaaaaagcactaaaaaactcaatagaaatttaatagagaagagaaacaagttcatataaaaataattcggctggggacggtggctcacgcctgtaatcccagacacttcgggaggccaaggcaggcagatcacctgaggtcaggagtttgagaccagcctggccaacatggtgaaaccccgtctctactaaaagtacaaaattagctgggcgtggtggtgggtgcctgtggtcctacctactcaggaggctgaggcagaagaatcacttgaacctgggaggccgaggctgcagtgagcagagatcccgccactgcactccagcctgagtgacagagtgagactctgtctcaaaaaaaaaaaaaaaggtcagaaaaggcttcaggtcaaattagggctttgggtcaaatcagggctacctggtctgggagaggcacacttctaactgctgatgccaccctcaaagggtctccagaagcttccactgactgctgttggctgcaccaggcagtgagtatcagtacatttaatcatcacaaaaaccgggcaggcagatgttggcggattgtctgtgggctgctgaagagctggtagagctcagcgcgtctgtgactggaccacagtgcgagtagctggggctgacagtggaccctgggctgctgcacccgctgcaacccccaggtggagggatccacgcagcctggtgacgatttggccctggccctgagccatgccccgcgtgacgcagtgctgtctgccagcctgggaggctcctcacctgtctttgcctgagccagggcctgggagtttcaggactgggaaaggaaagaaaaccccaaggctggggtcaggaagaggagggctattttgctgctcagtcctgctcccccaaaccagaccttcagctctttgcaaacgaaagagggggcaaggccaaagcggggttccttatgcaagtttgcttcctgccctgaaaaaccaaaaaaacggaaaacttttccaagcaagtgtaagcactgtgtgaggacagagtgggcgtttccttctgaaataggagactaggcccccagtgggcaaagagaccctgacccgcttctccatctgtgcgggggaatgaatgagcaggctcaccctgttgtcatcctgcctgctgctgtggggcccccctagatcttaggaattgctgggtacttccggacagtgaggttgtctgagctgcctgcaggttccctgagtctgggtactcaggggctgggcaggagatgcccattaagcaggtgttactctaatgagtgagcttttcaatgagatgaacaggaaaattagcaaaatcatgttcctaatcattcctcctgcggcggccccaattttgctaactgttaacattatatgatgcataagtaggggaatgcatttttaaaattatggtaaagcctatgtaacattttataaaattgaccattttattttattattaatttttttttttttaagacagggtctggctctgtcacccaggctggagtgcaatggtatgatctcggctcactgcaacctctgcctcccaggttcaagcgattctcctgcctcagcctcccgagtagctgggattacaggtgcctgccactacgcccagctaatttttgtatttttagtagagacgggatttcagcatgttggccagcctggtctcgaactcctgacctcaagtgatctaccgtgcccagccaaaatagaccattttaatcattcataagtgtacagctcagtggcattaggtctgttcaaattgttttgcagccttcaccaccatctatcttcagaactcttttctttttctttttttttttttttgagatggagtcttgctcttatcgcccaggctggagtgcagtggtgtgatttcggctcactgcaacctccgcctcctgggttcaagcgattctcctgcctcagcctcctgagtagctgtgattacaggtgcccaccaccatgcctggctaatctttgtacttttagtagaacagggtttcaccgtattgcccaggctggtctggaactcctgacctcaggtgatccacctgcctcggcctaacaaagtgctgggattgcaggtgtgagccactgcgcccagcccagaactcttttcatctgcaaaactgaaacttcgtccccaagaaatatcaactttccgttcctctttctcccagcccctggcaacctccattctactttctgtctctatgaatttgacaacactagggacttcacataagtagaatcacacagtttgtgtttttttgtggctggcttatttcactcaacataacgtcctcaaggttgatctgtgttgtagcctgtgttggaacatccttccttcttaaggctgaagaacattccattgtacgtatgtagcacattttgtttatccatttatctgtcgttggacacttggatcgcttctgccttttggctattgtgattaattctaggaacaggaatgcatttttttttagaggtagggtctcactgtgttggccagcctcggcctcccaaagtgctgggattagaggtgtgagccactgcgtccagttgggagtgctttttttttttttttgcagacagagtctcactctgtcacccatgctggagtgcagtggcacaatctcagctcaccgcaaacccagcctcccaggttcaagcaattcttctgcctcagcctcctgattacaggattagaggcatctgctaccgtaccccgctaattttttttttttttttttggagacagagtctcactctgtcgcccaggctggagtgcatggcgtgatctcggctcactgcaacctctgtctcctgcctcagcctcctgagtagctgggactacaggcgcatgtcaccatgcctgactaattttttctattttttttagtagagacagggtttcaccatattggccagggtgttctcaaactcctgacctcatgatccgccccccttggcctcccaaagtgaatttttgtatttttagtagagacgaggtttcaccatgttggccaggctggtcttgaactcctaacctcaagtgatcagcctgcctcagcctcccaaagtgctgggattacaggtgtgagccaccacgcccggccaggagtgcatttttaacagtagcttgttcctgggagtacccgctgtgcacgtaggtgagcagaaggcgcagtgggcgcagggtgtcctgagcttccctgttacaggtgccttggtggaaatgcgccggggtcccaggccccaccgcttggccaaatgtccttaggaaaatgtagcctcactctccacccccagcccaccacttcactttctgtatctgccgggtggggttgcatggagaagattgtctgtgagcctgtaatgttaaagtaaggggcccctacagtctggggtgggctcccagatgctactatatccatggccacatgggagtgtgggatctgtatgtccctagagcaacttgggccaggccggccaccttcttctgtctgagggttatgattgtaacagcagcagtgatgacagtgactccgagctactgtctgaccccctgcccccagaacgtcaaaggggaccgggtggtctgctgggtccgttccatcctcagggcccaggacagcccctggcctgccagggggacacagaaagccctccttgagtgaccgagtgagtgaactggccttccttgtcctcaggtccagctgggagctccccgacctccaggagggcaagatccaagccatcagcgactcggacggggtgaactacccctggtacggcaacaccacagagacctgcaccatcgtgggccccaccaagagggactccaagttcatcatcagcatgaatgacaacttttaccccagcgtcacatgggccgtgcccgtcagcgagagcaacgtggccaagctcaccaacatctaccgggaccagagcttcaccacctggctggtggccaccaacacctccaccaacgacatgatcatcctgcagacgctgcactggcgcatgcagctcagcatcgaggtgaaccccaaccggcccctgggccagcgcgcccggctgcgggagcccatcgcccaggaccagcccaaaatcctgagcaagaatgagcccatcccgcccagcgccctggtcaagcccaatgccaacgatgcccaggtcctcatgtggcggcccaagtatgggcagccgctggtggtgatcccgcccaagcaccggtgacagccaggaccacccgctaggttagactcacaaataataataccgctgaaaacaaaactcagactcactcttcagtcattcagcaagatacaaccattctaccctctccagcgggcggatctcactgtgctgatgcccccgggaaggcctccccggctctcggcacctgcttcctttcagggagaggggagatctaagcaggacagacagaccccacgtgcgccctcagggtgacctctggtctccttgcctctcctttttctcagtttcagtcgctcacttgtaacagattccctgaaacactgctttttccgttttttaaaaaaactcctcttttgggggctcaggggcaggaggagggggagctgattaggagggaagctccagcccccgatcaaagagacagatccacactgctgccgatttgtggcgctggccggccttccccccaggtccctccgccctctgtcatgcggccttatgtagacttgctttgccaaacttttgccttaagctgaattgaaaggaagaaaaccaatcggagaaagaaagcaggatctcttttctaccggacttttcctcttctgccagaggtggagggagggttggggtcgcccgcgagagtctcttgagcccttcttcccggttgtcttgggagaagggtgaggatgggcatttagacccgaaaccagctgctcactctttctttttggcagaaataaaaccacaggtagattctgcctgaacagccccttctctccctccacccccaggtcgtatccctgcacctgcggagaggggctgtgagctctggcggggggtggctccaccagtcgcctggcctcttctcccctctcttcccagcagccttaacttcccttgggcggctctaggaggagagaggcaggctcctgtgagcccagggaattttcaccctctcagtcctcaggacccacccccagttgagtccctggcccttcctccaggtgtgtggctttttccttctccatccacactggtcccaaatgcctgggggccggccacctggaccgccgacacacagcctcaatgttagtctcaaaggtaaggaaggcattcacgtcccttcttgcagggcattttaagacttgaatcgggtgggccccggcccctgtggctggctggcccctggtgtactgtaaaagggccaagacagggctcgttctcaggggcgcccctcccaggccctcagggcagcgggacggtgcagtcaggctctgggtgccacagtgatggaggtggaaggcacccaagctctagggaagtcttgggaggcagtcggccgagcccctgcttcctgtcctcaaataagtgaatccaggccaagggctgggagggctgggtgggcttatcgtcgagagggttcagagccactctggaggctgggctggcacagtggagagcgacaggtgaggacagacgtctggaagcccatccctgggacctgccctcccttggtcccaggtcactggagctccagggcttacttagtcctgacccattgtgccagggttctgagcagtgtcggccttgtggccacttgcaggggctattaggggacatcccgctgaagccacgctccttccagcttgccaaacccacagctacccgcccgggacccacactcagcctaataattatcaagcacagaaaaccgtccatttagaaaaataatccatttctgctgcagatgagccacttgtaagagtctccgtgacagcgtgggacggtgtgggaaccaaagtccctgccctgctcctttgtccacgggctattgcgtttattcaaggggtgcttaatgaccgtttagccactgccgtcggtctccgggcccagctcgtgccaggaggctgtcctgggacacactgggctggagctgccggctggcacggtgctcagggggcccctgatgggggccaggacctccccgcagaaactgcaggttctcttgtgaggatggaggccgtgccaccccgaaaggcagtagccttaggggaacagtgggtcccagctgcatgtctgaggatgggtggggacagggctgggactcagctttcattcactggagacttctccactcaggtctttgttgcactaaagcagggacaggaccctgggggttcaggaagcgggtctcaggccgctggtttattcctggaggtggggctggagaccagaatggaaaggggcttcctgagctgctagggggtgaaggacccccgaacccgcatttcttgagtgagagcaaacactcgaggcaggagccagcacccctcccactgcatgcccggcccccagcccaccttgccccctgacccaccttcacccgtgccccttctttctgcccttcctcaccgaagaagggctaggaacaccctggagaggctgcaggtccggccacggacgctcagctgagccccggtctgctccttcagcctccttgctcttgttggagcacaggccccaggcttcctgccagggccccgattcttcttatgtcctccagccccgccctggcgtggacatccactcactccttccagcaataagaaccgtccttggtcgtggagagtactgtgaaacaaaccaatgcacttaccaggaggcacaagactcttgaagaagatgtaaaatgaaccttttttttttttacaaaaaacaaaaagcaaatattcataaagagaaataaaatgtaattttaaagtaggcttggctaggtcctggatgtttctgaagtggagattcactttggggtgggtggctcagcggtgctggctgcgggggtgaacgtatctggggggcaggaggatgggctgaggctgggatccccgtgctcagggcctgggagatgggaggagggagccagcctttgagtcctgctccttccagctgcttctgttcacagccccagctccagcgagagcagccctgcggtctcagccttgcacctggaagtgcccctgccagtgccctgcctggagggtggtgggcttggaggtagagctaggaattgggggcagcttgactttttggcgaacagtaaaacccctatgtcaagggcgattaaggtttagattgacccttaacttgggcctgcaaagctgtcttcttgtggacaagcaggacagtgtcagtctggacgggggctccatgccctgccctcagccagcagctgttgaggggtcctgtggggccccagccttgaatggataccatcttataaatggagctttcttgtgtaaacatgggtgggggccctggaggtcctggagtggctgtgggctctgaaggtagatcacaggttcaaggccgtttatgtgagcttgagcccgacactcagcccctctgagccctacttactttgtatggaaaaatggagatgtggccaggtgtggtagctcgcacctgtaatctcagcgctctgggaggctgaggtgggtggatcacttgaggtcaggagtttgagaccagcctggccaacatggcgaaaccccgtctctactaaaatacaaaaattagcccggtgtggtggtgggcacctatagtcccagctactcaggaggctgaggcaggagaatcactggaacccgggaggcagaggctgtagtgagccgagattgcgccactgcactccagcctgggtgacagagtgagaccctgtctcaaaaaaaaaaaaaaaaaaaaaaaaaaaggaaaaagaaaatggagattttcagaggagctgcctcctggcggattcagtggaaactccctgttctttctgggtgcgaactcattgaatcctcatgacaaccccacaagggaggtgttaactgccacccccatttcacagacgaaggaacggggagagtggacgccaaggagctgcctgagaccacatagctaggggaaggcggagccaggattcgaactctggccacagagctacctctcgccatagcgcactctcagtcttgagcctgagacggtggggccatgtgcagtgtccaataacattggtgactgttactgagaaggtcccaggcctctgctcccccatcctgggtgccccgggcaggaagtgcacccccctccccaccccggaagtctcggggcagtcagttctttctggcccacaatgagcccatctgattccctttgagcaggggccggccgctgcacccaccgcacacaggctcatcatccagggtgggcagtggcttctctgcacccccacggggacagggaggccccatgcactctgggcatcagaattcgggtcttctgtgggttctccacgttgcagcaaaccaacggcgctcacatcctgcctcctggggctgagacaccaaagcaggaaattgcataacaggcattgctggccgagctccacgcagatggctcctgggtggtgcagttcactgtcgtggtttggcttctcggtgtggagtcggctcctgagctctgcccatgagagactatggtgtgtgtgtgtgtgtgtgtgtgtgtgtgtgtacagagaatgggatgcaggcctaacctgatagcagggtttcagaagctcaggagagcaaagccttcatgcagaggcgcagtgagacgggagatggggagacgcagctgaatctgtgggtaacagtttcgagagggaaatgtacaaggagggagttgtgagtaaagtggattccaagtggcatttagtcacagagtggaagccctccagcctctccagctgacagcaggtgaaatttagaagtccagactgggagaagaggcacagacagtagattctgcccagctgtcacgggttcctctccaggatctgggcctgggagagccggctgtctgggccaggccaggctcacctgcctgagacatccagggtctgggagaagcagctgcacagcgaccccataacatctccacctcccactttcaaagtcacttctcaggagagcctcttctgctctggggctgttttaaatgggacagagacttgctgtagtctgggccatgaggccaaacaggaaagcccctcttggagcccaaaagaagacagtttcatcaggaaacaaaaaagctgatggcctggcggggtgcggtggctcacgcctgtaatcccagaactttgggaggccaaggtgggtggatcacgaggtcaggagttcaagaccagcctgaccgacatggtgaaaccctgtctctactaaaaatacaaaaattagccaggcatggtggcgggtgcctataatcctaactactcaggaggctgaggcaggagaatcgcttgaacccaggaggcagacgttggagtgagccgagactgtaccactacactccagagcctgggtgacagagtgaggctccatctaaaaaaaaaaaaaaaaaagtgtgatggcctgtggcgcttgcaggccctcggaggtttctaacagcccaggtgatcttctgtcgcctctggcttggtggttctcttggtcatcctctatcctgcttgggcgcccccacagaaatggcttcccacctggttggggtctgggcataggatgaaagcaaatattttactgtgtgacagtccaaaaattgcccatcaggatcacagggcacaaccagccactccggtgctgtccaggccccttcctgccactgctgacccttcaagtatgctcttccccttcaatcagtgaggacgctgccccacagaagggaccaaggggcttgccaaaggtcacttttctgggaagatgcagagctaggctggtttcaaacacccggcctttgaccccgtgctttgtctcagctccttctatgacaccccagccttctggtaccccagttctaccagactgccctcagctgtcctgttgctaaggttcctcggcatgacgctgagtccgagtccttagcagccctgttgaccctggacgatggaaactttttttttttttttttgagacggagtttcactcttgtcccctaggctggagtggaatggtgcaatctcagctcactgcaacttctgcctcccgggttcaagcaattctgcctcagcctcctgactagctgggattacaggcgctccacgccacgcccggctaatttttatatttttagtagagatggggtttcaccacgttggccaggctggtctcgaactcctgacctcagtgatctgcccgcctcggcctcccaaagtgctgggattacaggcttgagccactgcgcccggccgatggaaactactaaatgcaagcgaacacgtcggagtgaatgaactccatctctgtgcctgtgtgcagggaggtgaacccgaaatcaacatgggaactggcgaaggccagcccagctcccttcaggcccagacggcacgacttggaatgcagaggcaggattagttcctgtatcagcctgagccctggttcttatttcatgttcccttttcaatcagacagaagaagggtgggtgtttacggcgggccagacacagctgggagccctgcactattcctggctgccacttgccttgctgagtgaggccaggcttgtcgctcaacctcacatgcctgagtttcctaatcgtcaggccagagacacgcacacttaccctgtcctccccggtccggggcccagcaaaggcatagcagttgtgctccgtgttaaacatgcaaatggagcccccagaataatcacactgagcaccagggcttagctcagagaccagggactcttctctctaaatacggctcaattcttctgcaacatctagaccacaggggcctggcttagtgatgtgggattctcagcatccatgacaaatgcagactgaatgctggtcagacagtcacacaaacgtattaaaatgctttacctcagctttattgggatacagttcacataccacacaactcacctatttaaagtacggttctggctgggtgtggtggctcctgcctgtaatcccagcactttgggaggccaaggcgggcagatcacctgaagtcaggagttcaagaccagcctggtcaacatggcgaactcctgtctctactgaaaaaaatacaaaaattagcagggcatggtggcacacgcctgtaatcccagttactcaggaggctgaggcaggtgaatcacttgaacctgagaggtagaggttacagtgagattgcaccactgcactccagcctgggtgacaaagactccatttaaaaaaaaaaaaaaaagtgtacggttctggccggtgcagtggctcctgcctgtaatcccagcactctgggagaccgaagtgggaggatcttgggctcaggagtttgagaccagcctgggcaacatagtgagaccccatctctacaaaaaaacttaaaaattagcgaggcataggccagactcagtggctcatgcctgtaatcccagcactctgggaggctgaggcaggtggatcacaaggtcaggagttcaagaccagcttggccaagagggagaaaccctgtctctactaaaaatacaaaaattagctgagtgtgatggcgggcgcctgtaaccccagctactcgggaggctgagtcagagaattgcttgaacccgggaggcagaggttgcagtgagccgagattgtgccactgcactccagcctgggtgacagagtgagactccatctcaaaaagctaacaacaacaacaaaaattagctgggcgcggtggcacattctcgtcatcccagctactcaggagaatgaggtgggaggtcgaggctgcagcgagccctgatcgtgccaccgcactccagctgggcgacagtgagtccctgtctcacaaaataaaagcaaatagaaagtgtacggttctatggttttagtatattcacagatacgtacaatcaccttggcccagttgggctctagaataaagtaaccatagaccggatgcctcgtcaaccacagaaaccaatccttcacagttctggaggctggaagtccaagatgaaggcgcccacagtttctgcgtggtgagggccacctcctggttcacagaagcgcctcctcgctgtgcggtcatgtgacggaggccggaaggcaggtcccacagcctctggggaaggagagcccagagtagctgaggaactggggtgcccacaccagcctgctgggggcttcaaatgttcttttaggagtgacaagggaatcgacctgcccagctctgcagccctgggggccacagaggaccggggcacagccggcgcctctgctcagggctccggcctccatctctgggagcgagcacccgtggatgcctcactccacccagggtcactgtcgcgcagcagcagctttccagaaggcagccggccattgacgagtgaccaggcggagacggtgaaggccagaagttcctccagaggccgcgtgccagcccctcgcctgtgaggggggcctgggtctccgggctccccaggacggtgcttcctcttgcagctgggcctggaggccggagagggtcatgtgagccctcctgggcgggcggtgcctctacggctgtgaccttgagcaagtccccctcctctcaggtctcggtttcctaggacatggagtggggacggaggtggttcctcacctcacgagattgcggaggcacgtgaagccgatggtcctgagcttctggacaagtgcccagcccagagtaagcgcttagcaaatccgagtgattcggcggcaccactgagcctcggtttcctcatctgcaagacagggttacgctttcctcacagggaggagggttccggggggtcatcaggcaaggccctcagcacagaaccgccaatagctaacacctattattgaccttgttgtaacaggatgataaaatggttttcttgactgggcgccacggctcatgcctgtaatcccaccactttgggaggccaaggcaggaggattacttgagcccaggagtggagaccagcctgggcaacatagtaagaccctgatctctacaaaaaatagaaaaaattagcccagcgtgatggggcatgcctgtaatcccagctcctccggaggctgagtcaggaggattgcttgagcccaggagttcaaggctgcagtgagctgtgattgcaccactgcactccagcctgggtcacacagcgagacccgatccctgccccaccccccaccgcccaaaaagcttttatttgctgccccaattttagctgagactttgagaggacaaaacaatacaaggggtgaggtcccccaccccacaggccatcttgctggacatgctttgaggctgtgcagcgccgtggccggcatctgtcccgggcccacttggtataaatgaggcagatagatgaggtgggtggaagaaaggcccctggccgagctgctcatgtggaccacgtgtcccttggagggtgggctgcctccttcctggttgcagcctgaccgaggtgggcagccagtgcctaaggtttgatccgtgttaaccgcaatcactgtcattggactcatcatcaaaagcataggtgcggccgggtgcggtggctcacgcctataatcccagcactttgaaaggccgcggcgggtggatcacctgaagtgaggagttcgagaccagcctggccaacatggtgaaaccccatctctactaaaaatacaaaaattagccagggtggtggcaggctcctgtaatctcagctactcaggaggctgaagtaggagaattgctggaacccgggaggcggaggttgcagtgagccgagatttcgccattgcactccagcccaggcaaaaacagcgagactctgtcccaaaaaaaaggcataggtacatgtggctcctggagtcagaactgtggctggccgcctgcctccttggcaggcagtcaccttcccggagctgcagaactttttcatcctacaaatctgaaactacacacattaaaggacagttcccccttctcctctctttccagcccctggcagccagcactccactctaagagtttgcccttttggccgggcgtggtggctcacgcctgtaatgccagcactttgggaggccgaggcgggcggatcacgaggtcaggagatcgagaccatcctggctaacacggtgaaaccccgtctctactaaaaatacaaaaaaattagccgggcatggtggcgggcgcctgtagtcccagctactcaggaggctgaggcaggagaatggcgtgaacccgggaggcagagcttgcagtgagccgagatcgtgccactgcactccagcctgggcgacagagcgagactccatctcaaaacaaaaaaaaaaaagagtttgccctttttttttttttttttttttttgagagggagtctcactctgttgcccaggctagagtagagtggagttcagtggcgcctctcagctcactgcaacctctgcctcccaggttcaagtgattctcctgactcagcttcctgagtagctgagattacaggtgcctgccaccacacctggctaatttttgtatttttagtagagacagggtttcaccatgttagccaggctggtctcgaaatcctgacctcaggtgatccaccctcctcggcctcacaaagtgctgggataacaggcatgagccaccgtgcctagccttgaatttctcttaagtcttaagagtaggagcaggggaggtgatgttgctcaaactctttttttaaaaaaacagctttttttaggtataattaacatataatatgtaaagtgaacaattttttagtttttaagagatagggtcttgctgtgttgtcctggctggagtgaagtggtatgatcgtagctcactgtagcctcaactttccaagcttaagccatcctcctgcctcagcctctggagtagctgggactataggcacaagctaccaaacctgctatttttttttttttaagacaaagtctcactctgttgcccaggttgctcactacaacctccgtctcccaggtttaagcaattctcctgcctctcctgagtagcttagattacaggcacctgccaccacgcctgggtaactttttgtatttttagtagagacggggtttcaccatgttggccaggctggccttgaactcctgacctcatgatccacacgcctcggcctcccaaagcactgggattacaggcgtgagccaccatgcccagcctaatttttgtattttttgtagagatggggtttcgccatgttggccaggccggtctcaaacacctaagttcaggcagtcctcccacttcggcctcccaaagtgctgggattataggtaagagccactgcacccagctattaatactttcttttatggattatgcttttggtctaagaaatctttgtttaatccaagattatgaagattttctcctgtgttttcttcaatagttgattttatattgatgtctatggtccaattttgagtcagttttatatgtgcagggcaggagtcaaagttctcattttggcacatggagacctaatcgtcccggcagcttttgttgcaaagcctgtcctttctcactgtgttaccttccacctttgtcgaaaatcaagtgaccagatacgtgtggatctatatctggatgttctattctgtacaattaacctatgtttctttaaatcttaacaccaggaccacatggtcttgaataatgtagctttctaatatgtcttttaaaataatagttgtatatattttggaagtacatgtactattttaataatttatatatataaattatatatattattattattatttttttttttttgagatggagtctccatccgtctcccaggctggagtgcaatggcacgaactcggctcactgcaaccttcacttcctaggttcaagtgattctcctatttcagcctcctgagtagctgggactacaggagtgcaccatcatgcctagctattttttgtatttttagcagagacagggtttcaccatgttggccaggctggtcttgagctcctgacctcaagtgatcctcccccttcatcctcccaaagggttgggattacaggcgtgagccaccgcacctggccaaattttataatgtcttaaagaaaagaagtgtaagtcctcaaactttgttcttcttttccaaaattttatgaaatatttatagctcctttgcatctccatatgaattttagaatcagctaccaaaaaaaaaaaaaaagaagtctgtcgggattttgattttgattgggactacattgaatccataggtcaatttggagagaagtggtaacttaacaatagtgaatgttctgattcatgactgtgtgtcccgtttatttaggtgttctttaatttcaatcagcgatgttttgtagtttttggtgtacagtcttgcacgtctttttttttttttttttgagatgaagtctcgctctgtcccccggcctggggggcagtggcacgatctcggctcactgcaacctctgctctggggttcatgccattctcctgcctcggcctcctgagtagctgggactacaggcgcccgccaccacgcctggctaatttttttcgtatttttagtagagatggggtttcactgtgttagccaggatggtctccatctcctgacctcatgatccgcccacctcggcctccccaagtgctgggatcacaggcgtgagccaccgcgcccggccgcacatcttttgttagatttatacttaggcaaatcatat

SEQ ID NO: 1184 - DNA, 4478 bp, Homo sapiens
ccgcagcccgcgcccagcgcacacgcgtcgccgcccccgcgcgccccccgcagcaaagttcggcttaactttgaggctggccttgacgcgctgtcccttccacctcccaccaggtcctcggcggccgcggcgaagcaggcggcggcggccggagcgcagccccgggaccctgcacggcggccggcagcgacagcggcgaagggacgcggcgcccctgcgtggggacgtccggcccgcgcccgcgagtgggcgccgacggggacccgcgccgcgctcccccgtcaccggcgagcggccggagccctgagctcgcctcctggaagccgcgggtcggcgctcgccccgagggcgccgggacctcggccgggtgaacacaaactgctctgcaattgattcgaccgcgccgggcgggtgcgggtgcggggcccggagggagcgcgtgcggaaggccggagggcaggaagtcaggcttctgccgcgagggtggcgcggccgcgcggggacagagccttccttatttatgagtctgccggcgctcgcctgcttcctccgaagacttcagggagagtctgcgagctgccgtccccgcgtgtgaggcacagaagggctggatgtcagaaccgcataattattcattaaactacaaactttttttaacccaaagaatatcggtgatttttgtccactgcgaggagaagaagagagagcccagggctcatgaaatgcagcagaatccttatttataaacaggccgcggtagtgatatatgcaaccccagtctactcagtgagttttctatcctatggatatcggtcttgagagttgagattggagagcagcgccgtctgtactgggtcctgcagcctctgtcctttcaatgcctggttttttctgtgactgctggccttccctggagatcagagcgctcctgtatgccatgggctgtattcagagcatcggaggcaaagccagagtcttccgggaagggatcacggtgattgatgtgaaagcctccatcgaccccgtccccactagcatcgatgagtcctccagcgtggtgctccgctaccggacaccccacttccgggcctcggcccaggtggtcatgccgcccatccccaagaaggagacttgggtagttggctggatccaggcgtgcagccacatggagttctacaaccagtacggcgagcagggcatgtccagctgggagctccccgacctccaggagggcaagatccaagccatcagcgactcggacggggtgaactacccctggtacggcaacaccacagagacctgcaccatcgtgggccccaccaagagggactccaagttcatcatcagcatgaatgacaacttttaccccagcgtcacatgggccgtgcccgtcagcgagagcaacgtggccaagctcaccaacatctaccgggaccagagcttcaccacctggctggtggccaccaacacctccaccaacgacatgatcatcctgcagacgctgcactggcgcatgcagctcagcatcgaggtgaaccccaaccggcccctgggccagcgcgcccggctgcgggagcccatcgcccaggaccagcccaaaatcctgagcaagaatgagcccatcccgcccagcgccctggtcaagcccaatgccaacgatgcccaggtcctcatgtggcggcccaagtatgggcagccgctggtggtgatcccgcccaagcaccggtgacagccaggaccacccgctaggttagactcacaaataataataccgctgaaaacaaaactcagactcactcttcagtcattcagcaagatacaaccattctaccctctccagcgggcggatctcactgtgctgatgcccccgggaaggcctccccggctctcggcacctgcttcctttcagggagaggggagatctaagcaggacagacagaccccacgtgcgccctcagggtgacctctggtctccttgcctctcctttttctcagtttcagtcgctcacttgtaacagattccctgaaacactgctttttccgttttttaaaaaaactcctcttttgggggctcaggggcaggaggagggggagctgattaggagggaagctccagcccccgatcaaagagacagatccacactgctgccgatttgtggcgctggccggccttccccccaggtccctccgccctctgtcatgcggccttatgtagacttgctttgccaaacttttgccttaagctgaattgaaaggaagaaaaccaatcggagaaagaaagcaggatctcttttctaccggacttttcctcttctgccagaggtggagggagggttggggtcgcccgcgagagtctcttgagcccttcttcccggttgtcttgggagaagggtgaggatgggcatttagacccgaaaccagctgctcactctttctttttggcagaaataaaaccacaggtagattctgcctgaacagccccttctctccctccacccccaggtcgtatccctgcacctgcggagaggggctgtgagctctggcggggggtggctccaccagtcgcctggcctcttctcccctctcttcccagcagccttaacttcccttgggcggctctaggaggagagaggcaggctcctgtgagcccagggaattttcaccctctcagtcctcaggacccacccccagttgagtccctggcccttcctccaggtgtgtggctttttccttctccatccacactggtcccaaatgcctgggggccggccacctggaccgccgacacacagcctcaatgttagtctcaaaggtaaggaaggcattcacgtcccttcttgcagggcattttaagacttgaatcgggtgggccccggcccctgtggctggctggcccctggtgtactgtaaaagggccaagacagggctcgttctcaggggcgcccctcccaggccctcagggcagcgggacggtgcagtcaggctctgggtgccacagtgatggaggtggaaggcacccaagctctagggaagtcttgggaggcagtcggccgagcccctgcttcctgtcctcaaataagtgaatccaggccaagggctgggagggctgggtgggcttatcgtcgagagggttcagagccactctggaggctgggctggcacagtggagagcgacaggtgaggacagacgtctggaagcccatccctgggacctgccctcccttggtcccaggtcactggagctccagggcttacttagtcctgacccattgtgccagggttctgagcagtgtcggccttgtggccacttgcaggggctattaggggacatcccgctgaagccacgctccttccagcttgccaaacccacagctacccgcccgggacccacactcagcctaataattatcaagcacagaaaaccgtccatttagaaaaataatccatttctgctgcagatgagccacttgtaagagtctccgtgacagcgtgggacggtgtgggaaccaaagtccctgccctgctcctttgtccacgggctattgcgtttattcaaggggtgcttaatgaccgtttagccactgccgtcggtctccgggcccagctcgtgccaggaggctgtcctgggacacactgggctggagctgccggctggcacggtgctcagggggcccctgatgggggccaggacctccccgcagaaactgcaggttctcttgtgaggatggaggccgtgccaccccgaaaggcagtagccttaggggaacagtgggtcccagctgcatgtctgaggatgggtggggacagggctgggactcagctttcattcactggagacttctccactcaggtctttgttgcactaaagcagggacaggaccctgggggttcaggaagcgggtctcaggccgctggtttattcctggaggtggggctggagaccagaatggaaaggggcttcctgagctgctagggggtgaaggacccccgaacccgcatttcttgagtgagagcaaacactcgaggcaggagccagcacccctcccactgcatgcccggcccccagcccaccttgccccctgacccaccttcacccgtgccccttctttctgcccttcctcaccgaagaagggctaggaacaccctggagaggctgcaggtccggccacggacgctcagctgagccccggtctgctccttcagcctccttgctcttgttggagcacaggccccaggcttcctgccagggccccgattcttcttatgtcctccagccccgccctggcgtggacatccactcactccttccagcaataagaaccgtccttggtcgtggagagtactgtgaaacaaaccaatgcacttaccaggaggcacaagactcttgaagaagatgtaaaatgaaccttttttttttttacaaaaaacaaaaagcaaatattcataaagagaaataaaatgtaattttaaagtaggct

SEQ ID NO: 1185 - protein, 283 aa, Homo sapiens
MPGFFCDCWPSLEIRALLYAMGCIQSIGGKARVFREGITVIDVKASIDPVPTSIDESSSVVLRYRTPHFRASAQVVMPPIPKKETWVVGWIQACSHMEFYNQYGEQGMSSWELPDLQEGKIQAISDSDGVNYPWYGNTTETCTIVGPTKRDSKFIISMNDNFYPSVTWAVPVSESNVAKLTNIYRDQSFTTWLVATNTSTNDMIILQTLHWRMQLSIEVNPNRPLGQRARLREPIAQDQPKILSKNEPIPPSALVKPNANDAQVLMWRPKYGQPLVVIPPKHR

SEQ ID NO: 1186 - DNA, 4563 bp, Homo sapiens
gcttcaggtcaaattagggctttgggtcaaatcagggctacctggtctgggagaggcacacttctaactgctgatgccaccctcaaagggtctccagaagcttccactgactgctgttggctgcaccaggcagtgagtatcagtacatttaatcatcacaaaaaccgggcaggcagatgttggcggattgtctgtgggctgctgaagagctggtagagctcagcgcgtctgtgactggaccacagtgcgagtagctggggctgacagtggaccctgggctgctgcacccgctgcaacccccaggtggagggatccacgcagcctggtgacgatttggccctggccctgagccatgccccgcgtgacgcagtgctgtctgccagcctgggaggctcctcacctgtctttgcctgagccagggcctgggagtttcaggactgggaaaggaaagaaaaccccaaggctggggtcaggaagaggagggctattttgctgctcagtcctgctcccccaaaccagaccttcagctctttgcaaacgaaagagggggcaaggccaaagcggggttccttatgcaagtttgcttcctgccctgaaaaaccaaaaaaacggaaaacttttccaagcaagtgtaagcactgtgtgaggacagagtgggcgtttccttctgaaataggagactaggcccccagtgggcaaagagaccctgacccgcttctccatctgtgcgggggaatgaatgagcaggctcaccctgttgtcatcctgcctgctgctgtggggcccccctagatcttaggaattgctgggtacttccggacagtgaggttgtctgagctgcctgcaggttccctgagtctgggtactcaggggctgggcaggagatgcccattaagcaggtgttactctaatgagtgagcttttcaatgagatgaacaggaaaattagcaaaatcatgttcctaatcattcctcctgcggcggccccaattttgctaactgttaacattatatgatgcataagtaggggaatgcatttttaaaattatggtaaagcctatgtaacattttataaaattgaccattttattttattattaatttttttttttttaagacagggtctggctctgtcacccaggctggagtgcaatggtatgatctcggctcactgcaacctctgcctcccaggttcaagcgattctcctgcctcagcctcccgagtagctgggattacagcctgtgttggaacatccttccttcttaaggctgaagaacattccattgtccagctgggagctccccgacctccaggagggcaagatccaagccatcagcgactcggacggggtgaactacccctggtacggcaacaccacagagacctgcaccatcgtgggccccaccaagagggactccaagttcatcatcagcatgaatgacaacttttaccccagcgtcacatgggccgtgcccgtcagcgagagcaacgtggccaagctcaccaacatctaccgggaccagagcttcaccacctggctggtggccaccaacacctccaccaacgacatgatcatcctgcagacgctgcactggcgcatgcagctcagcatcgaggtgaaccccaaccggcccctgggccagcgcgcccggctgcgggagcccatcgcccaggaccagcccaaaatcctgagcaagaatgagcccatcccgcccagcgccctggtcaagcccaatgccaacgatgcccaggtcctcatgtggcggcccaagtatgggcagccgctggtggtgatcccgcccaagcaccggtgacagccaggaccacccgctaggttagactcacaaataataataccgctgaaaacaaaactcagactcactcttcagtcattcagcaagatacaaccattctaccctctccagcgggcggatctcactgtgctgatgcccccgggaaggcctccccggctctcggcacctgcttcctttcagggagaggggagatctaagcaggacagacagaccccacgtgcgccctcagggtgacctctggtctccttgcctctcctttttctcagtttcagtcgctcacttgtaacagattccctgaaacactgctttttccgttttttaaaaaaactcctcttttgggggctcaggggcaggaggagggggagctgattaggagggaagctccagcccccgatcaaagagacagatccacactgctgccgatttgtggcgctggccggccttccccccaggtccctccgccctctgtcatgcggccttatgtagacttgctttgccaaacttttgccttaagctgaattgaaaggaagaaaaccaatcggagaaagaaagcaggatctcttttctaccggacttttcctcttctgccagaggtggagggagggttggggtcgcccgcgagagtctcttgagcccttcttcccggttgtcttgggagaagggtgaggatgggcatttagacccgaaaccagctgctcactctttctttttggcagaaataaaaccacaggtagattctgcctgaacagccccttctctccctccacccccaggtcgtatccctgcacctgcggagaggggctgtgagctctggcggggggtggctccaccagtcgcctggcctcttctcccctctcttcccagcagccttaacttcccttgggcggctctaggaggagagaggcaggctcctgtgagcccagggaattttcaccctctcagtcctcaggacccacccccagttgagtccctggcccttcctccaggtgtgtggctttttccttctccatccacactggtcccaaatgcctgggggccggccacctggaccgccgacacacagcctcaatgttagtctcaaaggtaaggaaggcattcacgtcccttcttgcagggcattttaagacttgaatcgggtgggccccggcccctgtggctggctggcccctggtgtactgtaaaagggccaagacagggctcgttctcaggggcgcccctcccaggccctcagggcagcgggacggtgcagtcaggctctgggtgccacagtgatggaggtggaaggcacccaagctctagggaagtcttgggaggcagtcggccgagcccctgcttcctgtcctcaaataagtgaatccaggccaagggctgggagggctgggtgggcttatcgtcgagagggttcagagccactctggaggctgggctggcacagtggagagcgacaggtgaggacagacgtctggaagcccatccctgggacctgccctcccttggtcccaggtcactggagctccagggcttacttagtcctgacccattgtgccagggttctgagcagtgtcggccttgtggccacttgcaggggctattaggggacatcccgctgaagccacgctccttccagcttgccaaacccacagctacccgcccgggacccacactcagcctaataattatcaagcacagaaaaccgtccatttagaaaaataatccatttctgctgcagatgagccacttgtaagagtctccgtgacagcgtgggacggtgtgggaaccaaagtccctgccctgctcctttgtccacgggctattgcgtttattcaaggggtgcttaatgaccgtttagccactgccgtcggtctccgggcccagctcgtgccaggaggctgtcctgggacacactgggctggagctgccggctggcacggtgctcagggggcccctgatgggggccaggacctccccgcagaaactgcaggttctcttgtgaggatggaggccgtgccaccccgaaaggcagtagccttaggggaacagtgggtcccagctgcatgtctgaggatgggtggggacagggctgggactcagctttcattcactggagacttctccactcaggtctttgttgcactaaagcagggacaggaccctgggggttcaggaagcgggtctcaggccgctggtttattcctggaggtggggctggagaccagaatggaaaggggcttcctgagctgctagggggtgaaggacccccgaacccgcatttcttgagtgagagcaaacactcgaggcaggagccagcacccctcccactgcatgcccggcccccagcccaccttgccccctgacccaccttcacccgtgccccttctttctgcccttcctcaccgaagaagggctaggaacaccctggagaggctgcaggtccggccacggacgctcagctgagccccggtctgctccttcagcctccttgctcttgttggagcacaggccccaggcttcctgccagggccccgattcttcttatgtcctccagccccgccctggcgtggacatccactcactccttccagcaataagaaccgtccttggtcgtggagagtactgtgaaacaaaccaatgcacttaccaggaggcacaagactcttgaagaagatgtaaaatgaaccttttttttttttacaaaaaacaaaaagcaaatattcataaagagaaataaaatgtaattttaaagtaggct

SEQ ID NO: 1187 - protein, 126 aa, Homo sapiens; identical to SEQ ID NO: 1182

SEQ ID NO: 1188 - DNA, 54542 bp, Mus musculus
  misc_feature (1)...(54542): n = A, C, G or T/U
acctgttatcagctagctgtcttctttccatcaatgtcacctcccctggctggctttctgctacttcctccgagaagcccaccttgactactcactctccagcaagcttaatttttgccatatcagacctatgcttttatgcatactcacaaatcagaactgctatgaatgctaccaaacagataagggaacggaggctgagggagttggagggagctgacccaagtcacacagcgtcttctgtgcccctacctgatagtattactctatgctgtagctccttcagaggcgtgggcctctacacctgccctggtcaatattgtggccaccagcagcttgggactagttatattttaaaagttgaactaaatgaattgaaaacctagttcttggagggtggaaacaggagggttggttggaagctggaggtcagcctcggctgtagagtgaaactgtcccaaaatactcagagaaacaaaggaaaaaaagcaagggagggggcctgaactcctcagccctgctagagctcacagccacagatgtctgacggttaccgcattgttggatgcagaagcctttccaacacctcatggggttctgtggtcagtactggtccagatggtggatgtgctgaggccttagaactctttgaatgtcaatgctcatgactaagggacgcagcaccgaggtcaaggtccgcagcagagagcttgcccagcgtgcatgaagccctgggctccatccccagcagcaggtaaagctgggcacggtggcacatgcgtggaagcgccgtgttcacgtggatgttagatggcagcatatggcaagaatttccagaatgtaagagacggaggcaggaggatcaggagttcaaggttagccttgtctgtgtagcaagtttaaggccagcctgacctatgactgagactgtttaaaaacaacaacatcaacaaaaaaaccccaaacaaacagaagcgtggtggtgtacacctttaattcaggaggcagaggcaaggggatgtctatgagttcaagactaggctggtctatgacagcctgagttcagcccctggaatcctcgtggtagaagaagagaaccagctcccgaaagctgtcctctgccctccacagatgctacatggtgtgctctcgcacgcacacatgagtaagcaaacaataaatgaatgcagtggggctggaaggaggctcagcactgtcttctcttccagaagtcctgagttcaattcccagcatccacagggtggctcacagctatttgtaatgggatgggacgttttctggagtatctgaaaacagctacaatatacttatataaataaaatcaataaatcttttttaaaaaatgaatgcaggccgggtgtggtggcgcatgcctttaatcttagcacttgggaggcagaggcaggcagatttctgagttcgaggccagcctagtctacagagtgagttccaggacagccagggctacacagagaaaccctgtcttgaaaaaaccaaaaaaaaaaaaaaaaaaaattgaacgcagtaaaaaaacaaacaacaacaaaaaggtggaggggaaaacctaggctctttggctgggtgtagtggcacatgcctttaatcccagtactcgggggtggggacagaggcaggctgactctgagttcgaggtccacctggtctacagagttagttgcaggccagccagggctacatagtaagaccctgtctcaaaaaaacaacataaaactactctctcactctcagcacaacctagcgtactgtctgctgaagtcaaacaactcctgtgtcttagttcaggcaaggtaaggagtccctatgaggaaaaacagtattaaaccaaatctaaagataattgactaagtgagagcaatatatatatatatatatatatatgtataaacagcagttagcactcatatataatacgccacaataagtaaattaagaaaatgttacctcagtttagaaatagacaatggaaatagatggaatacaaataattaaaaaataataataataaatcttattcctgcttgtttatttcaccaggtcagaaaagatcgaaggcatatgggaatatgtatggtcttatacattggtggggcatgtcagtggcattgtgcccaattagtgggcagcttgaggcatcgctcaagagtcaatttgcaaatgccctttgactcagtaagcctcgggcccaacacaggatggctgactccaggtcttgtgctatgaaccatgactccccggcgagtgacgagtggtcaggcttgggctggcagagttggcggattatccgaaggactgcggacttggctgtggaggcttaagcagaatggattgctgtgggcgagttctttggagtctttatctttctgtgtggctggctcagatgacagcaaggaagcccaggacaaatcaatatgtccttggtcagctgctttggtggctccactgcctctctgcttctacaaataattggagtccagtcaccagtgaatcagcacggacagcccttggcaagccggaccgagaaggttgcttggcgtggcatgtctgggtgaaggcggctctgtactgggtgggtcaggtgacagagagcctgggccagctgggtagctaccctcaaggggatttgggcaagtgacatttctcgttcctaccttaggtcttcctgtgtctggttctctcttgtgacaatcctcttcccagtccagggcctccatttatttccttcactatgtccagatgtcattctaaccctggggtggggacggtaaacgggtcccaggctctcattttctgtgcatgtgggtttgtgcatgtttggtaccatgaggacacagaggcaggagcaggcattgatttagagggcgaaggatgaggtttggagacaggagctagttccagacactgagtgatattatcgtataggcagcaggggtctgagggaggcaggcagagagtcagaacagctgtttctaaaagggtctaagtgccaggctaagaacttggcattttatccagagaaaggcagaaatatggagaaatttttgtttatgatattcttataattaatattgttaaagggcaaaaactaattcaggtttgggggtagagtgcctggttagcatatgatgtcatggacctggtggtacatgtctgtcatctgagcactagggggtggggagtgggtagagacaggaagactagaagttcaaggtcatctttggctacatagcaagtttgaaggtagctgacacaggaggatcttggctcaaacaacaacaaatctaactcattctaacataaaaatcatacaagggccaggagcatttcttctaataaactgtgtgtgtgtctgtgtgtacgtgtatgtgtgtgtgtctgtctgtgtgtgtatgtgtatatgtgtctgtgtgtgtctatgtgtgagtgtgtctctgtgtgtgtgtctctgtgtgtgtctgtgtgtgtgtgagtgtatgtgtatctgtctgtctgcgtgcatgtgtgtgcgcgtgtgagtggtgctggagctcaggttccaagtacttagtaaattcgaggtaaggctttaccactgcaccacgccccagcccagaagagccaagaaggatcactccagtaaacagcttttcccagcctctcttcagatggaagcttctgctcacaacccttttgggtgtatccctccaagattcttttctatgctcacataaacagctcttatttttcttcacaaaaacaagcttgtcctttaacatactgttctctgagaaccgtgtccacctcccgctccagcacataccagtctcctgctctcggggagcccattaatgtcacctgccttcacatggcattctgagtgccgggatggggcaggggacaaaacacagtacttgtcctggaggcctcactccctcccagtatctgcctataatatacagtatgcagggatgtcttgcttctacaaggcagagtctcgctttgtagcactggcaggcttagaactcattatggaagcccggctggtttgtggatgaaccttcccctgcacgtggaaggattacacttgggtcatttgtgaaaaggaattttgacaattttgggtgttgtgacacatgattataatctcagcactttggatgctgaggcagggggactgctatgagtttgaggaaactctgggctacacagcaagtacaaagtcaaccaggctgcatagtgtctcatacaaaaacaaattctgcacacacacacacacacacacacacacacacacacacacacacacacatttctgatgtggggtcccgtttgttggctaggctggtgacgtggaactcttggagcaatttcctgcttcagaatccacatggctggaactatacacattgtattgttacatttttaaaaggttaagtgtgtgtgtgtgtgtgtgtgtgtattaggagtgtcatagcgtgacatacttgtagaggtcaaaggacaaccttcaggagtgtgtctctcctaccaacatggggcctggggatcaaactcaggtcttcaggattggacagtgagcacttgtacccattggcccatctggctagcctggtgaatgcttatcactctgtaggattattttgaggagctgaagtatagtcactcatccgaacactcatgcacctgcccgcacatccatccatgcatgcacccattcatgtatctgtccaccatgtagccatccagctgtatctccacatacatgtacatttagtcccagatttgaagtatgtgttatgtggcaggctttgcactagataaaaggaccccatgggtgaagagtgtgattctgtgcagttcctgctacgatgggacagagctgtcaacagcagcacagagtatatccatggccagagacagtgtactaatttactttctattgctgtgataaagatcataaccagccgggcgtggtggcgcatgcctttaatcccagaactcgggaagcagaggcaggcagatttctgagttcgaggccaggctggtctacaaagtgagttccaggacagccagggctatacagagaaaccgtgtctcaaaaacaaacaaacaaacaaacaaacaaaacaaaacaaaacaaaaacaaaaagatcataacctagaccaatttggggaggaaagagtttatttggcttacacttcaccattgaggaagccgtggcaggaacttgagcagaataagagcctggaccagagaccatgggggaaccctgcttactggcttactcccatggcttcctcaatctgcttcctttgacaacccaggactacctgcctggggtggcactgcccacaatgggctgagcccttccacatcagtcatcatcaagaaaacgccctacagactgactgaggcatctgtcaattgaggtccctcctcccagatgactctaccatgtgacaagctgacataaaactcatcagcacagaaggtgaaggttctccagggtgctctgactcctctggctgcccttctgtctgaaggctgtggtcatttcttcattcttgtctactcccgaccgaagtctgaacccttgctgactttcacttaactgtaatcaagaacaactcagaaggcatgtaatcaaattaaagatatcagggctattcaataggtaggaagtccttctcggactctatagccttaacagggactttgagtaactttaaataaaaatgtttttatttgggggactgaagagatggctcagtggtaaagagtactggctgctgctcttccagaggaccggggtttaatttttagcactcacatggtagctcacaaccatctgtagttttgtttgtcaggagatctgatatgctctattgacctcctccggcacctcctcagtgaagaatgtggcacacagatagatgcacatggagggaaaacacacatacttataaatataaagagaaaatgtattagatagtcccttcccgaggtccagccaagcagcttgcaagcctgactacctggcccctttccatcccatggctgctgcttgtgagccacgtggttgacctccatgtcagcctaactcaaggcatggcattctctctctctcccctccaccttcttcttccaggcagttccaaagctccgcagcttgtcacttctggtttcccttttaaacactaggacaacctttaggagtcagttttgcttctccatgatggctcctggggatcaaacttaggttgtcagttgtcaggtctacacacagcgagtgcttctgctagaccatctctccagccgttgccggcacaactcctcagtgactactatttttttaaaaatatatatttatttatttattttatgtatatgagaacactgtagctgtactaatggttgtgagccatcatgtggttgctgggaatgaaggttgctcactctggtcaggcctgcttgctcagaactacctcacaggtcggccccactttgtttttattattatatctaagaacactgtagtgtcttcagacacaccagaagaagggcgttagatctcattacggatgggttgtgagccaccacgtggttgctgggaaccacgaacttgaactcagaaccttcagaagagcagtcagtgctcttaaccgctgagccatctcgccaaccccctcagtgaatattagtacaacaacacaagaactatctattgatgcttcctgtgaagtgtgtctcctttttcttcctatcattctgtctctacccataggactggcttcagcctcatgtctgtgtccctgtggcttgctacatagccttggccagcctaaaaactgctatgtagatcaagatgacctccaactgtggaaatgctcttgcccttctgtgctgggatgacagaagtgtgtcaccaccatctgggtcccctttggaaccacagtgaaatctaaacttttaggccctcaaggggccttgtaaattagtggcctgcctgcctcaaccctttttctattccttcttacttactccagtacagtcacagagtttcctaaatacacaaacttatgcctctgcctccagtgcttcacatgcctgcctgggatccctgaatgaatgaagtctcagctgagatgacagctctgagaggtgtcccttagccactgcacccaaacagagcctccagcttagtctccctggatctttcccccaagactgtctgcctgagatggtcctgccaggtttctcattcatcagatcctggcctcagcaaggtggggcagtaaagggttgggaactggggctttggaggaacatgaactgctggctggcggttcccacgacacttgctcagatcctcttgtgtattagtcagagttctctagagtcacagaacttatggatagtctctatatagtaaaggaatttattgatgacttacagtctgcagcccaattcccaacaatggttcagtagtagctgtgaatggaagtccaaggatctagcagttactcagtctcacacagtagcctggtgactttgggaggtcattgttcctttccccagtatgaccacatcgaataaacctcctttcactcttgtctcttttactggaatattgaggaggggcagtcaacgctatcttctcttggaataagctttccaacattctttcccgtgcaagcaaagcttgcacccaagcttgtttgccacaaacagccaatagcatattggctagcttttgagcatagtactgtcgaccccaaagcactagtcctcactatgctatactatactatactatactatactatacgtaatacctgccatccgtagatcctgcacctcagggttacaaactgaggccccatgttggttctttgggacagggtttctctgtgtagccctgcctgtccaggaactcactctgtagaccaggctggcctcagaacagccagtattctggtctcacaccaaactgtctcttgcttcctgtcctgttaacatgctttttgcactgcctgggaagtgagaagggacacttccgggggtggcagggtgttcctagcctttaggctacacagaaccaaatggaaccaggcctggcggcaaattgttggagaggcctgaggttacacagttgaaactgaggatccagttaggcctccagacactcttggctgacttcttagatatctcatcaggggccacaggctcttcccttagggaacaggccttaaggggaaaggttgagagtccagccaaagaatttaaacccttcaggccaagcctggtgtggaagcctaagccgtaatcctaaggtttagtaaaggcagaaggaccatccccagccacacgcagtttgaggccagcctgggctaaagacaaaaactaaacacagtcggagctggcaagaagactcagtaggtaaaaatgcttgctgccaagtcagatgacctgaatttaatccctaggacccacgtggtagaagggaagaacttaagttattctctgcccttcactgcactgtgtgccatgtgcccaatcatatcaacaaacgtaatttattttttaaaagacaaagccttcaggcctctacttcctcaccttcaaaaggagatgcctagctacatcagggaggtctggatggattggttcgtttcatctccaatctgactgcgttttccacattatgggacaattatgaggagcagagattgccacccatgcttctgaaatgtaagctcaggaagtcttcatgcacatgtccaaacatgatatcatgcatggtatcaaacatgatgtccggcagagaatttacatctcaaatgccaatcagcccaactctctttaattttccacagggaagtccagcagaccttaacttatctcctgcccggatcaaaaacggcctttcactcacccatttccccattttctttcctccaagttatctgatgccagaacaatcaagtcactatctagctcaaaaaaccaggagatgcctccttctttgctctggtctacaagactgggccagattctagcctgatctgctgttctctcaaattagaattcatccagggatactccacaaactttttgagtaccatgctgccgggccagcaggcctctagtgactgccactgcctgtaccccgatgcttggccggctttgtgtcagaatcctttgaacttccgttccaatccgaaagcacacgcctcctctgacctccctacttgagttcttcagcagactctcagatccagtctttccactgggtgcctgcctgactcaggacagagttcctaaacactggcggcctggataaaaagaatcataaaatgccgatagtttggagagtacgaggtccccaaggtgtcctttgccataactatcgggaaactttaaacaaaagccttagataacagcctggaaccaggcaggccgagtcacaaggttgccgggctccaatggatcttcaagagcggcaaagccaggacagatgcttgtcatttttagaggcgagcaagacctgcataggtcttgagacacctctgcgattgttttcctgagaacaggggtgctacctcctcagcctgcttcattgctcactgagctcaggtcttggcgggatccgggcaggccgttctagccctagtttccagattgtttcccctagtcattgtttctccttttcttgggctcgcgctctcctcccgttctttccagtgccggcccccacaccccgcgacctcccaccgcctctccgcacccccccccaccgcgcttctcaaggaggcgggtccagccccgcgagcgctccaatccgagcgccctcaactggccctgcctccgcgagccccgccccacgccaccgccagccaatagaaattcgtgttcgtacagtcggcctgtccaatcgcaggttggctgtgagcctcgcgcgccccgcccctgctgctctcggccgcggctccgcgggcggtcgcgccggggcttcggcattctccgagcagcgccgagctgcgtcgggctcagccggctgcgtccggaggtgcgggcgacggcgccgctgtgctccagcggtgctaaccgaggcagaagccatccggccgggtcggaaggcgcctgagactcgggcagggcaggagcggcgtaggtcccaggactgagcgggaggcggaccggcacacgttcccggcccggcagagcctcccgaagcggtccctgcagagccgggtcggtcgccgaggtggcttccgcttcccggggcctcacctgcgcaggccgcggtgcgccaggtgcggaggcgtgtgcgtcgcctgggcacctcccacggcagccagcggggcggaggcggggccgccgcccgggtctccagcggttcgcccggccgtctccgtcagtctcaccggtccgccgggccccgcggatcgggatgctgctgctcgcttgcgagccgccctccacgccagcccccgctgccggggccgcacctcgctgtttacatgtcagtggagcccgggttccccgagggtgagagcagccggctcactggacctggggctccgaactcagatcctctcctgcccgcagcctccgccgccatctggactggatccagctctggtgtttttgaggaggggggtgtggtgtcgggaaaggaatcctggggttttctagtatccccttctttttttcttttttcttttctttttctttttggccctgcgggcttcagactcagggaacttgctcatggcttttttgatgaagaagaagaaatttaaatttcaaaccactttcaccttggaggagctgactgcggtccccttcgtgaacggggtcctcttttgcaaggtccggctgctggatggcggggattttgtcagcttgtcgtccaggtaggcattgaggttttcgcgtttgcaggggagggtggggagtgctgatgagtgagatctagccacttggcaaatgtggaagactcagctagggacggatgggcaaggggcccgcctggggaaagatttgctctaagcaggacttaggtctgagtgagctggcagagcgcctggcatttgtctgcaggtgaccagccagaaaccttttagggccctgcgtgcactcttcaagtcacccgttttacagatttgtatggagagagctgactgagattttcactttaagggattaagtaagggtgtctcaggccaccttgccaccaagctggctcctgtggctgtcatacgattgagagattgggccagccagggctctctggctctctccccttggctgggaaagcccagttccaggcactccctggatttgattgcgggaggtggctggattttgggttgcccagccccctcttgagtgactgccctccactggctaaagctggactgctttgcaatgcaaatgtccttgccaggagactgccttcccctgtgaaaaaagccatcgggtttgattttgtgtccgtcatcgtcctagtaggtccagcttcccagtttattgctgaatgaggtcccagtccaccttttgcaggttgagctcatggcggtcacacagtcctgacctgcctgcagaggtccgtagagtccagctaatggggaaaggaagtcaagttcaggctctttctgggttcctgttccctcttcggcacactggacctaatacaggtttctccatcagctttgtaaagggaagttgcagtagataggcccctggcccagctcccgagatgcttccccctcctagcctgtcccttgcttcttaggtcttgtgggcctagttagctggacctgccccactattcagagcgctcagaggtgtgttagacggattgggataatgagccccagaaagaggaagtaaattggttgccagagactttgccggaggcatttgtcaaccagatttggccagttggaagacctgttgggtgaattctgttggaaggagagaagctatgtggtctgattcagattttggaatctgtggatagaggtgcctgttctgtgcactgggcctcctgttctgctcagggccgcttatctgaggaatttggacaagggctgccctttgtggtgggggtggctgcaatcctctgcctgtgaagtctgtaatccctgcagttacccttcctaacgaccggctggtccggccatggcgcagtgtcagagggttgtgctcagtgattggacctggggtcagccactgagaaatacccagtctccctgatctcacgtgctggcaattactggtgctctgctcacggtctcactagcacctctcaacaccacccacggagcaggagtagaggagggggaatcattcttacagaggtgaaaacagaggctcagagagagtgactttagctgttacactgtgcctctgaccctcagtttcctcttactgtaaaatggggaagtaatgttcacctttcagttgtgaggggaatggagagtgtaccatgcatgaccaggggagtggctacagtagttaagattactgtattgtaaggggtcccggccccagccttccccaaccccaggctacaggatgggggggacaccccttaatcagcagaggtccttaagtgatctgggattgagcacagtaccaaggaatttgtaccaagcccaggctaaagtttcacatgtctacttagacccttagccagccactgtgaccctacctgtcagcttttctcctgcctcaacatgtccccacatcctggaaagtctggaaagttccaggacttacttagcacacatgctctggatttcacctctgttttcccttcttccgcctggcaagaggccacggattctctgaacccagccaagcccaggttcccatctggaataaagcctcatctgggtgggtggggtactaaagaggaagggactgccattgaggcccaaatctcagtgcttagatcctggacacttgggtactgctgagcaagtgtggcggcagagagccgtgatgtcggaacccacaccgctttaaagtggctttggcttctgtgggcttttaccaaggagatgagcgttcctatgttgcctttccctctgcccatacccctcccatatttattttgtaccccaggagcctcagccacctctctactaccttgatcctgttgtttataagttgactgaggtgactggacctgcttagcacatctttccaaccctaggatggctttttggactgttggcagcatgggtggtgtcagactgactacagccctaggccccacccttgcaacaccctgtttcctagctggtgttttccagtgtgttgagtgccatggcaacggctggtattcagctctgtctgacccagttggaacaggtgcgacaggtgattcctggggctgtttcttacccttatcttccaacactgccttaggagcagcagttcccacggcaaccagagtcctcgtgcccagattgtgctaggcatagcactgagtgttttgagcagggtatccccactaatcctcccagccatctggagaggcactgagaccaaagtggtaaaaccacacactagaggttaccaggtagtaaatggcacagggggaaaattcctttctcatagtgggtttctttgattgtatgcttgccgatgccagggactacccaaatacctgaccatctaaccctatttgtgggtgaggacactgagaaaggaagatgaagtgactggacccatgttaccgagccagagagtagcaaagatagaacttgattgcagcaggtctagtgcaaagccctgtcttggtggtatgtgtcagaagcaactacagatccatgggacattccagactcgacaaaggcttctttcagtggcttgggtggtacagcagagtctggtgctggacggttttgaggcactgaacttggttttgtgaagcccaaggtaaatatagagtctctggactaaaggaatcaatgtatttgtggtcacgcataggcaatccctccacatagtgggcatttgctatgtgttcttgcctggggcctcccaggaagataatccaagtggtacctgggagggttttcagggttagcaagtgtccaggaggatacagaggtcccatccagtgtggcgattctggcagaggcgaatgtgtacacgtggccgtcagagcaggagaatgttcctccctggcattggcttgccacacgcatgggagaggcgtgcaaggaaacacgggcttacctcgcaggaaggagaagagagaggagaggatactgcttccttagcctgtggatggggaaaccagtctggggcagaagtgtcctgccagagttacttcatgggaggaatatgtgacacagttggccagactgtagtctagcccttacctctgtccccggggcttcaatcctcctctttgcaccaggaaagtgggtggggccaggaggagaagaaagatctctttcaaggccacctccggctttgtacttgagtgctaggttgtctgagaagctgtgacttggagtgggccttccctcaacccttgtcctttcttcttggccagctttgagtcctccgtggggttttatttttgtaaatagagcctggccgctatcacactttctgtgacgcagccatgtgcccgtcatacatgagtactcaaaggagcttttgggatcttgagttagctctgcatctagaggtcttgtgctcaagcccagaccctggtcctggggcaggcagaccgacttgattgtttcctacccaagccacattttttggccagggttctctccctctccccctccccctcctcctcctcctccctctccctctatttaaaaaaaaaaaaaacctgtagaatgtctctgggtttgcagccatgcagggcatgctctgggatagcttggtatggggctctgagaaagcagaatggagattcctaagggggtacagtgttaagtacaagaggaccccacaattggataaggcctttattgtcctggtcagaactgggtcgctgttggttgaacaaattggaaaggtagagagtgaataaccatgggttttttctttctccttgactgagactccctttccactggcagtcttgtttcttggagttcctagttaggttgtgacaatatgcttggtaggccaagctaatctggggcaggttcttgtggatcctggtggaccctggcatgccaaccggtgaaatggttttgttcagacatctgtccatctttcttttctctagcttcaaattcttttcaccccttgccctaagcttactgttacctcaggaaggaacagtttatgggagtcttagaagctgagagggattgagctgaagatggggaagaacctgtagagaaggaagctcctggcttgaaggcatgtctgcctatgcgaggtgggatggggtgtgaaaagagttgtgggactagagaaaacaaaaatggaaggttgcgggactggaactgctttcagtcttagggatcctatgagggcccagggagcaggggaacaatgtggcatcatttacctgttaagatgatggctcttgggtgctggtaagagacaacaggcagtgctgacctagcctggcagagaagtggcacatagaaaagaaggaacagaatggagaagataccgggcaaagtgggcaggagggttccctatcctagacacggcaccatactttgaaggtgctaggagataggcattcaaagggggcatagtttcaacggtgtcctggaaaccagggctcatgtaaaagtggaaaatcagacagcggtgctgtgaggcagcagtcaacataagggactttgaaatggcctcctcacctgtgttttgagggctcttccttctcctatggcaaactcttaaatccttggcatgttctgagtgtctcttactgtcagtttgcttcctgaggcccctgtgatcggtctttcctgtgcgggcacagtggccagggaacctatggtaagaaaccccattgtcaggagatggggaggagtgggccttagagatcagccgggccatggtgccagcatacctggctctctctgaagtcagatcatatggctgtggccttggtaaggagcttcccaacctgtttcatgccttagtgactactgcttgaacctggcctttgctgccaattggctacaccattggcgtatgccaccttggctgtgccttctcctgcctggtaacttggcagtagccctgacctgaggtgatctggttgtatggaaacaagcccctcaggcctgctctttgcatggaagtcctggttgtgtggaacttcttggctggaataacattgttgcctataggtcctgcttacctgggagtggctgggaggcccctggaaaccctggctggctttcaagaagccctgcttgtgcatccaggtgccagctagtaagcctgcctttgggtcttaggaactgagggacttgatacttggaatataaggaactgggaagtaaactagtttaaaaaggagccacagagaagtgtgagcaaggaagagacaccaggaagagacctggagctaaggtgtggtgagagggcacataggtctgctttatctacctctcctagctagtgctttgaattgtggggacattagatttgtcctagctcctagtgatatcctgggcctgctggcgcctcaaagatcagaccgtatttttgtagacttgaagctgcctaacctgtatctagtgtcatcaaagggttgtggttgcaaacttgtggtttagtttcttggcatccgtggcttagaagaaagagctcttgaatatagacctgaaacagcttttaccccattttgcccagatgttgactggcagccctcagctctgcaaccaccttgtttcaggggtaggcagaaggagtactgttgataggaaatgactctctgttggttaggtttctattttaccgccccaccccagcctgttgttcactgcctctgatttcaacaagggacttaaactccagcctcttccatctcccttgaagcaggactgctgttgctgggggatgaagtaatggtgcttgttggagcagcttggctcctgatccacagtggaaacactgttacactgtgtcttacttattccctctgggccaagaggtgtgtctcttagtagctggtactcccttgggggtctggaccactgtggtgctgacaagagagggtacctattgctcagacttgctcctttgcctttagcaggggtgagagatggtaaggagtaccctagtgtctgagctgagggcctagtggggcttgccgctgggtccccatattttctcttccccattggcttagtcctgctctgctgaaacactgctctggtaccctggcagacaagcaaacaaccccttacagaggtgcaggcactggctataagtctcctggtagggatggatgagatagcccaaggtctttcaatggcctacatcctgccccttgtttttctggttactctgctttttcttaacccccttacccagctttttcacatagaactactgctcagcccaatggccattctaggaagtcccctacccccaggcctattgaccttgttacctgctatagcccttcatttaaaagtattatagtccctattcattatatccagcttcttcccagactatggcccttcaaggccagaaaagcatccattgcatcttagttcttgggcctcatgctgtgtgttggcatcaccccaggctgggacttctctcccctggctctgaaccaatgtggttgttggtgttgactatgtggtggctactgccagctgctaagcccaagcctaccctccatccagtgcctgaagtatcagtctgtgccaggaggaacccttatccataaactaggcagctgggtaccactgtggcttaaagactgcaattgagaggcagccaaggacccactagctgagttgagtgtatcacttgccgaggatatcagtgtctgtacatggctgggagggagcgtgaactcaggcactaccgttgggtcttgcagctgttgaattgctttggactatggccaagggctttctccctgtagactgtttcttcttctaatgggtactcacttgagggcatcaggaggtcaagattacctgctcagcacacgaccaggcccaggcagctaccatagactaaatctgccaagagaggaagtatacacctggtatccagagaacagaggctgggccgtgttcacatgttaagcggtctcttcagacatgtgcaggcaagcacctgtggcttatactttcctgggttgttccatgacagttttctggtcactttgtatgttcgggtccatggaactatgggatactgtctacctctgtagggtcctacctgtctacacctgtcctagtcattgctggacaggccttgaggaagtgatgtgaatttggggtgggttggtagagcttggttgtgggagaagagcaggagagaactggtgattttttttttgggggggggggctgtcttagagaggggaagagcttggagatggacctgacaatatgctgacgaacctagggtgggtttgaatccatcagacatggattttatttatttcttagttcacaactatttttatgtatatgagttttttgccttcatgtaaatctgtacactgaagtagaaacttaagggttctttggaaagtcagttgaaggaacgcttcactgacacaggcacaggagaaaggatgttctgctaaagcaagcacgtgaaaggacatgtgatgaaggattctttgctaacaacatgcatgtattggtctgctttatattgcatagttgagctccatttgtcgggactccatagagagaaacacatcaaaaaacttctggtggtgtgttgcagtttctttccgctaccatggactcaggctgatgggcagagcgatgtcagctgagacagacgcacatgctgaggcaagactggtggaggacacatgatgtttggaggggataaacaggactcgatggacagtggctgtggctgagctaggcgtagagagctggctgtacaatgcttgttggtcgcatgtctttgctgatcttcactttgcagatagaggcatagttgagaacttctccttggcacccctccggatcccttttgctgactttgtttggaggctaaggcctggctgtctctactaggtagtgctaccactactgatttatgtttgttatcctgactctgccgcactagactgctggtgtatctgtgaggtgtttgcaaaatgatcgagctgctactgtggacctgtgagctgaactgctgatttccagacaacacagacaggagttgctccaaagaaccatttctaaacaggtccacttcccctgtatctctcttttccactacatctggtaggtgatgggctaaaagggaggttaaagcatttaagaaccaaaattagaagtaggatttgaaaaattaaagttgtagcacacaatgtgtgtacagtgcccacgaagaccaaaaagggtgtcggatcccctgaaactatagttatagatggttgttagtcgccacatgggtcctgggaattgaaccctggccctttggaagagcattcaaatctctttcttaactgttgagccatttctctagcccccagacttgtactttagaactactaaaggtagcactagagtagactgcttaggactgccagttacaggaggccaggaagggtatcttcccagccattgtcatggaccatttggagacactctgcaacaggtaaagtgaacaagtactattgacaaatggcctatgtatggcaagtgtggtggtttgaatgaatatgcctggcccagggagtggcactattaggaggtgtggccttgttggaggaaatgtgggagtgggcagtaagacactcttcttaaccatgtgagagccagtcttttcctagtggccttcagatgaagatgttgaactctcagctctacctgcaccatgcctgcctggatgctgccatgttcctgccttgatgataatggactgaacctctgaacctgtaaactagccccaattaaatgttgctctcctaagagttgccttggtcatggtgtctgttcacagtagtaaagccctaactaagacagcgggggttcctgtagagttctaaaccagtctggttaagaaaagatgaggttttatttgttggaggtgaggccgtgtatataagggccttttaggcctgcagagttctgcttgagcttagttacacagtatgttttttcttgaggacttgtaagctgcaagcctctgcttcagaagcaggcctccagttgttcatacctctgggctgtaggtgggcaccaaagctttcaagacaaacacaagagtgccttgaaggctgaagtggatctttggggcttttcctaggtctttctggtaagccagcctgaaccattccaacccgatgagcattgctttgtttacaaggcagtggttcatcttggcagttgcagacagtcttcttgatctggggattttccttctaccacctacaaccccagcatagcagggctttctggactctagatggagcttagcagtttgaaagctctgtgggctcccgaggttaccaaccggatcactaggtgtcagaatgttgcccgtgaatgggataatgaattcttccgtggtacctggatgccataatgaacctgttggccatcatagcctgtagcagagcacatgctcagtaaaagctggcatggttagtttcaatccaaagcagtcgttggaggggatctggggctggaagcataaaaggaacggctcctatttcttcctctctccgttcagttgctgttcttatctcttcctgaagctcacctgttgaaacatgcataattagagctgagccattccctgccctggccttgatacttgtggtctctgcctggggcctgtaagcaggcagagaccattatgtgaccttctcagagaagggcagagcatagagggggtggggtttttactaagcttacacaaaccccaaaacctcaccttttatttttctgattttgtttgcttgcttgctttttctttttcttttcctttttctttttctttttctttctttttttttttgttaaagatttgttattataaataagtagctgtcttcagacgtaccagaagagggcatcagatctcattacgggtggttgtgagccaccatgtggttgctgggatttgaactcaggactttcagaagagcagtcagtgctcttacctgctgacccatctcatcagcccctgctttttcttttccttttctagacagggtttcttttatagccttagctatcctaggactcactctttagacaggctgacctcaaactcacagagacccacctgccccagcctcccaagtgctgggatcaaaggtgtgagtgccaccactgcccagttccctcaccttttgttgttagctttgagtcaaggtctcactgtgtagtcctgttgcctagaactcactctatagaccaggctggcctgaatctcacagagatctgtctgcctctgcctctgcctcttgggagctgggataaatgatgttgatgtgcaccactatacctggctccaacccctgtcttagggatgaacctttgactggtgtgccccactaagtcccaagaggaaacagcctaggctcagcagttctacagggtttgtgtttgccaaatggataacagggaaaatttggaccttgttgtgaagctgatcctgcccatattggatgtaggccaggcagcctttctgtttgggcagcagtagggtggactgtttggggctttgggttgcagagggcattctctgtagcagccattatcgcaggcccatcccatgacactgttgaacaaaaaaggcccaaggcaagatacacaatagcatttgagtggagttgaaagcctgtgtggttcaaggaggatgggattatccttgtgtggggcctgtgtctggacagggccactcagcctgactcctagtaagtgctcagtggcttgcttgaagttagtggcagtggcaatgattggcccaggagtggtcttgagtctgcagtctcaggtgtctatggaggaggtggagccctgtgagtcagggcctcatggtggtgtctgaccctgggccttctgtcctgtgatcggaatcttcggtagctgctgagcacagctggacaaacaggtctgagtcagtgccaggctgtgaagagaggtgactctggctaaacaactcctgattatcttgtcgccttaagttcaaagggccatggggaatccgatgtgcagcaggaacaccgggttagcaggtacagtagtgatgatggtccctgactctacaaactgtagagaacaagctgcaggcacatctgggaatcccctactgggaagtggtgcccctgtgagaaggcttgactttagggaaatagactacagagatctctcattcagttgttagatcttcagcaccatatttgaagataggagaccaactgttagtgtacagacgccctgcctctacttggctctgggagacaagggccttgcttggttccaactacacctatagacccagtcctgcccgcacagttagggagcgcccttaggatgggcctgggtgaaggtatccccttgactggagtctaagtaatttcaggaaccaggccccagggacaggaatctctccttcctctcactccttcctctttgggtgaatcaaataccacccgggcttgagtcactggtcacacattcctggccacctgccacacctctgaacatgacagctgagtttcaggactggggaaatggccagatccaaggtccagagcaaggaagagggctgggtcagtactttttgcaggcttccaggaccacctgcctctgaggcccctctctgcaggtactagtgcatggctaggccatgtccacagttccacagaggtgcctatcgtgtttagtttgggcactagcaattccatgagaaagaaagtgactgagacccaaagggcgctagagttcatgggtggcagaggcttgcttggacccatctttgcctccccgtgccactcaagtgagtctgctgggtttaggaaggggaagtcccctgagcagatccgactcaacacctcagcattataatagtctaggtcttaggaattgacattggtaccacatcccagtgtaacatctgttgtgccttcttcctttgaattcctagggcctctgttttccagccctaacatggaaaaatgtagtgttgggcatgggttcagatcactgaccttggacaggtaaattcttgtgccttgtgttcctagcctgtgacatgggagtgatgggctatggattctgtgaccatctctcccttggcatgaagcaggtgtgataccatctcttcccttgtgtggaatactcatggaaaaggatgagatcacagggcctagggttctggcaggacagagagccatgctgtcattgagacctgagaatggttctcctatgtcggcagatttcccagggatgctgggaatgcaaaattatgtctaggggtacagactacccctcaacccctggactcccttaagtccctggactcccttgagaatcagtgtcctgatctgtgaagtataagtatgaagcgagtgtatgaagagcacttggcacttaggaggacatccaggagacagaagccacgagacacttttgtacatggggctggacctgcatttggttcaaagccagcaacttactatagatcccttcactttagagcaagatccaggaactaggcctgagggtgcggcccagtggtagagcgtttgcctagtatacacacacggctctgggtttcaaccgtagcatcaacaaaaaagaaaaaagctagtgattcctggcacatttcagactccggtttacaggcatctgcctgggtagtaacatgagctgtctgtatatcctggccacgaagcagaaggacagctacgtgccagtgactgcaaacaaagaatgccaacacctacctgtcttgggtttcttgaaggtcagtctccagattacatgactgaagggcaccaggattcaaacccaggtgggtcttaacctgatgctcctaagccagccagcttgagtgcccgtcgatcatctcaccccttctccgtggtgcacttcctaaagctgcatttgctcacattgtgcttgatggcgtcacttgccaacgtcagcttgtactcccagcttttctgtctacccctgagccatttttagggttcttgataacagaggagcaaagaaggcagcatggggccgaaggagcgcctcaaaactctccagtgttgggcaccaagtggcttggcttctaggaacttcttgctgcctcaccacagaggagggatgtgccagaactgtagggaactgcttcccctgcacgtggccctcaacttctggcaggagtcaaacactgttgggctgccacgttggccctcctggcctgcagcccctggatggatgccttggctggtccctggggtgggcccctccccaggcagctgtgcagttctctccgggaaagcactggcagatgttgtcgatttaaattgtttccttattttattctcagtcggggctgcctctcatcagcctagactctagattgcatcactaggaccgcttgtacaaggaaccagggaaagcctggggttcaggctgtgctgggcaaagccagagaggggcaggtggacagcaggaatgggcaccaagtgatggaacttgtggtggtgcctgtaggctgcatctgaggactaagtctcgcaggatatggagcacagctaggactgggaggttcctggggtcctcctataaatgtctacctccttgtaccagagttagctgaaagatggatgaagaatggcttcccaggcctctgaccgagcatctcaactggagctgatttggttaagtcccacaacagcttgtcacatctggagttaggctactctacgggatgcagctaaatgtgccacagtgcacaggacaactctcacaaagaaaatccctgtcctgcagagcccatggtcctggcagacctgctggcaatcttattggtagcaggatagtagacattgtgtgctcacttgtgtctggaaatgcctgtcctactgggcctcacctttttttttgctcagaagatttgagtgccgaactctgccagtctaatgccccctattgagtatgccaatgatgtactgatagacatttatatttactctgtgtgtgtgtgtgtgtgtgtgtgtgtgtgtgtgtttgcatcatgtgtattggagggctagaactcaggttgctaggtttgtatatatcaagtgccttttcatggcaagccttttttttttaacctctagtgagaaggtgaagtgttttaggtggccctaaggtcaccctggagccttatcacagggactgtcatgctattccctgaggctcacttttccttgttttctgctcctgtagtgactgccagttctgcttgcaccttaacatcaactctagggagagtccccctgggcttcatggttcctagcaacttatggctgggagggagctcccatggcagcttgtcacctctgtggtggagacctagggccgccaagactctaggaccctgttgcaccttgtaagcagtgctgctgctaggtcccgacatcgctgcagtgagttcattcctggggaccaggaagcctgcctgcctggatgactcctgatgggaacattgcatttctctcagagaaactcttggaagtggctcccttcagcctgaaccgcaaccctccccaccctctggggcctctttaatcttgtttattgtaaaccagagaggcagtagactggcctttccttcttctgaggtatctgtttaccttcttcatttatcgggaaactgaaatgacatagtgaactagggtgtctcgtggtaggctgctgcagggagacctggtgttctgtgactttgctccaccctcctggaccttggtttcttcatctgcagggaggaacagggatggtatctatacaggccccaggacagaggagagttcttttggtcctgtgtttgaaccatggatcccatagaataagatcaaggtgtgggtgatactttaatgcattagaagggccagagaagagagtagcgatctcgctctgccatctctgtcctaggcttttaggggagagaggccatggtaacagatgtggtccccattagcatgtggctctgcaggcactaagttgatggtcttctctacatcccatttgagctgagcagtgagaaaggagtcaccacgatagccccatgcaatgggcatgcctttcaggctttccttgtgttgttcctattgctggaggctttctttcatctttatctagctgacctcaggtttgaaaccctggctgtggcatcagtgtccctagatgtctatccgactctgtagagtgctcatgtagcccttcttcagagatactggcagtttcccagtctgctccaggacactgcaggaggctcattccacgcctgtagactgagctggtgcctgcagccattctccatggatacctcgcagaagtctgcttgacagttggatataggtccaagggccttgctaaaccagtcttcatggctgcatggagtaggcagagccagtcagggagacatattaagaggttcctgtcagatccggaaaagatccagaaaatccggagcatctgagaccactgttttgtggggcatttactctattttaggacagttcaaaaataactgcatgctggccacagagaccacagtgggtaaagggcttgccctgtttcgctgggatttgcacatctaattgtatgtcttaaagctaaaaaagcaaaacctgtctctttaattacctgtccctggcagtggcagcagggatgcacaccctaaaaccccaagttgggagagctgacagccagccttctacccctcatagaggttgcccacatcactcgtttgtccctacttggcagtgcctggggggtaagggtggaccctgaccttgaatcagatacttgtggttcaaatccctttgcttgtaaccacccatcctaacttaattcccctttcctttaaagttagaattttaattaggagaactactcttagacaaaaacaaagtaccccaacaacccctcacctgtagttttgtcaggcttgattgagctatccccttccttctggccattgtcccttcatatcagaatgaataggccaggtgtccagggagctggcagttcagggttgtggtcttcttagggctggctgggatgatctctttgaggcttggtttttgctaattttttttttttttgagttatctggggctgagaatactaaaggtttgtgattttacatttgctgttgtctagctgcatcctgagccatgatatcaaggcagggagtgggaatttgtcttttcacacttgctttccctggctatggcccagtgtgctcctgatgaatggggatctatattgggcactgctatgcatgggcctgtggtgccattgcagtccctcctaccaccgcccagcccattgaggttacagatgtataaggtaatgctgagctcttggcatccttgatactctggggtctctctgctcttccccaaagtggctgttttgttttattttgttttgtttcaagaccatttctctgtttaatagccctggctgttactttgtagactaggctggccttgaactcatagagatctgcctgcctctgccttctggttgctgggataaatttttttttttaaattttttggagtttgttttttttgtttgtttgtttgttttttgttttttgtcttttttttcaaggcagagtttagtttctctgtgtagccctggctgtcctggaactcactctgtagaccaggctggcctttaactcaaaaatccacctgcctctgcctcccgagtgctggggttaaaggcatgtattgcattacacccagtcagaaagacttttctgctgctgaccttattacatacttcaagattcctagactcaaagaggagtcagttcgctttacccacttaggcattgtgagaatttacaactgatattaacagttcagtgaaagggtaaggggctgggcatttgattcagtggtagactgcttgcttaacacgtgcaaagccttagggtcagtcagtccctaggacaccagcagtaagagagggaagggaaggacagaggctgagcaccagcggtaagacgcttatctggcactctgagtccatccctagaggggaaaaaatgacacagtatttctctcttcccatcctcgtctgtagtcttcagacacccacgtgccagtggtggccctcatctgatatttgggcacctttgaatttcccggcataccatcatgtgtgtgtccttttgaaactaacaaagatgatatattgtagaagcccttctgtacctggctatttctgctgccctgccgaagagcaagaaaaagccacttccttcctttccctttctgttcttaactttttgtttctgtttctttgtttttgttcttatttttgttttcaaagacagaatctcttgtgtagccctggctggtctcaactcagagatccatctgcctctgcctcaggagtgctgggattaaaggcctgtaactatcaagccctattccctttccttcttccccaccccctccgcctctcagacagggtgtctctgtgtagccctgaccgccctggaactagctctgtagaccaggctggcctcaaaaccagagtttcgatctgccttcctctgcctactgagcgctgggattaaaggtgtgcaccactgcgcctggctttccttcccgtctggctaccagtttcctacgtgatgcccctaagtagtctctcacatggagttgttcctatttttgcctaactgggaaggccttagctgcataccccatctcagcacccccaggtgatctctgtaatttggggctaagactccctttccccatcactctgcttcctttgtttctccacacacacattggccacattcctacctcagggctgttgccactcctcatgtctccacctgtgtctgcagagctcactcactgcttcaatgctttggcttggtgtttctttcttgctaagaccttcccagaccaccagtccctcacttctggggaatgtgactggcacctcatcccatttcctttttactatctaggacatgcgttgcctaggcttaatgtgtttcttacctactgtcagagtagcgccccctcaaagcaggaatttctgtcttcatccagaatttttttttaagatttatttatttattatatctaactacactgtagctgtcttcagatgcaccagaagaggacatcagatctcattacaggtgggtgtgaaccaccatgtggttgctgggatttgaactcaggacctttggaagagcagtcagtgctcttaacctccgagccatctctctagccccttcatccagaatttttataagtacctagcacactgaggatttgaagtgaatccagtctgataattcctaaacccaacctggccagctccgtgtaccagagctcatgactacctttttgacaacctcagtcctgcctctgggtctgagtcttggctgtctcatctctgctctgtctggaacctcgttccttgacagaacctgggtctggtggaacctctggcccctgtcatcctgcatggcccaggccttggcctggcgttaagttagtacttggtgagcattacagcatttctgcactgccttttcacatgagtgaaaaggagacatagaaacggccgccttgtgttgaagatgggatgaggacacggcaggcggcttctgtatgtaatgtttgttacacgctcactctgacactcgggttggacctggtaaggctgcctgctgctgcttttcctcagaggtggggacatgtaatactgactgttcagagcctttaggcaacaggagggtggcccaggtttgatcccaaaaaccctgccttgcttaacttcctgtagaaggagggaacaagcctgccagtcacctgagagcctgggaaggaaggcttcacgtgatttgctctccctggcacagcagggctaaccggaaccacatctgagcctcaggcttcctagctggcattcccaagacaggctgagaagagggcgggcagtttgctatcagcttttgttcccagacaaaccctaattcctctgggtggttcaagtgtcccagccttcctgcttctgcaggtctcaggcagctgctcctactcctagatgggtgtgtgttggggggagctgggagttcacacagagtggttcctagtcccgtcctcttttaggctcaggcctcagttgcccaagagtgacttctctgtccttccacttcctgcctctgtgtctgctctctgcttccatctaaggtacatccatggagggagacagccatgagcaggcgcagacatctgactcccgcccctcactggtgtcatcccctcctgtccccactcctgtccccactgcccatccttgttgatgtttctgtgtcccaggcatatcctcacgctagggcctttgctggtcacctttacctcgctctactctgagcctctctgaggcatcactgctaaaggcccctttctagacacctacctcaagtagcagtctgtcttatctctctcccaaccctccccttccctgccctgcctttcctgtttctattgagcagatgttctgtgcctttcgtcttctgctctactgacataaattcacatacagcgtgatccatctacttaagggtttgggcttttgttttttatttttgtgttttggtgcttggtacggaacccagggccttgcacatgatcggcagttgttttcccccacggaccagtgggtttttaggttcacaaagctgtgctctcctcgctgcagccatctgcagaccacgaccatttcattactgaatcaagaaatgccacacgtgagctgtcactcttcatttccctagtctgctttctgactttctgggcatttcttataaataaaatctacactagactctcttgtgtgctggccttagcagtaatgttcacggttggtagcattgttaggtaagggccgtcttttattactaagggcactgcacttcaggagcagactacaagtgtttaccctcaccactggggcattgggttgcttttgcttttttaccagtgggaacagtgctgcttggcacatttatatgcaggttttggtgtgcatgtaaactctgtttttgttgggtgtggacctaggagtagaattactaggtcatatggtaatatggaactcctggcctcacaagcccaataggacttcagctgccaggttttcctgccttttgcacccctgagccagtatggcagcctgggactctcacttagctagatagcctggactgcagcctgctttgtgagccctgagctctgaattgctggagccccagtgtcaccaactataaggaaagggtgacagagattcacaaccactgaggttgtgaagccagcaacgcctgactgtagccctctcagaccctcaccccaaagcgtgaatctggcaagtaactcatgtttcttgggtccctcagggtgtgggaaggttatgtctccgctgtctacgtggctattcatcctggtagtggggtgcactggatggagatactgtcacacacccgcttcttctcatgcctgacccttcctgagcaccagttctgccaaggtgggggtaggcggggactgtacgatgctatcaccccacatcttactgagcccccccccccacagcagcttggtgaagtttagatgagctgttttcggggttcccactgcataacagccacctcatttagaagtgctgggttgttgatgtggtctcattccagggcaggaaggttggaatcttacctggtatcagagaaccttcatttttccatgacaatggctgataggctttctacagcactctgagcaggctgtggtgactaccaactttgcagttctttaaatgatgcctggcacctgggaagtagcatgtcgcattagctgttgtggttattgtccttagaggagtctggctgaacccagtagactggtgggaggtctggggagctaacctagccttggccccttctgtccagtgagctgactgagttcattctgggaagactgaagtgagagtcacattaagtaggcagcaggaagctgggagtataggaacagcgaagtcaaggagcagaggctcagcacgtcagtgccctgtgccctagccttcccttgcccaagggctgctttttgatgcttcatttctcatttcatactttttgtgtgtttacaatcatgctagcatggtctcgtggaaacactggctccttgccctgtctgtgataggcctggagttggggctccatattcacctcacgttcgcctaccccatgttcctctgtcatgtctctgcagggaggaggtgcaggagaactgtgtacgatggcggaagaggttcacctttgtgtgtaaaatgagtgccaacccggccacaggcctgctggacccctgcatctttcgagtgtctgtgcgcaaggtgaggtgggctcatgggactgagcctagggactgtgagctcagagctgagggtgcgtgaggcccctttcctacgtgtctaccccaaggagaattgtggggtgcttttggaagatctgtgtttggnnnnnnnnnnnnnnnnnnnnnnnnnnnnnnnnnnnnnnnnnnnnnnnnnnnnnnnnnnnnnntgggaggccagggttccctagtcatgctttgtgtctctctctctgcaggagctgaaaggtgggaaggcgtattccaaggtaagagggacatgtgggagccttgcttctcccgtccttttcctaggatcccactagtcaggctggggattgggtaagagcttagcaagaccacccagcccctgctcccgaaggtcgaaggggtgtgcgaccacacccagcttctgtactttgtatgttttgctggggattgaacccagggccttgcaatgctaggcaagtcctctaccattgcttctggttttctaaggaaaaaagaaacacacatccaaaactgaatgaaatgggcacagacttggagaaaaggaaggcgagtgctgtgcgcatgcgcgtctaagcagcagttgttcacaatgctgtgcagatgccgcagcttgagcgccttacttacctacccagtgtatcctgagcggctttctgtattctttctaatggcagcagcggctcgctgtgtgctggtgagacagagtcagcccttcactgctgttgtagagctgtgttgaccccaggtcttccttagtgccgtcttccaccgccacctcctcccctggcttcaggcctacagttagaagcttctctgtgggaacaagtgggagaagatggcctggctttgagtgagcccgttctgtcctctgtctctgctctctggggtactcttggtcagcccagcacaggtggggctgtacctctcaccccgtgggggacctgagataggggagcacgggctcagacatccccactgctggagttccagaagcccacagcttctcatgtctgcctggcccaggactggaggggctgtcggagggcaggtgtctcttgtttactcatgagtaaggactgcagtgttatagccaaggagcccccaggccacatcagatgctgccagacctttccctgctgttccacagcagaacctcaccatggatttatcccactatgcagacaaggaagccagtatactcagaaggactaaactgtaaaatggtgtccctctgagtcatcacaggggcttgaatccaaacccacttttctgaccctgaaggccgtacccctaaaacacgggagtggagatttgtgtgttactggtgcacagtaaatgtccagttggctggccaaccagacactacctccctctctctgttcaggtagatgtggagtccacccaactttcccatgctgctgcccttgccctgtctctgtctcacgtgcacacgtcccaggaggaccagaccagctcctgggttcatgtccttacactagcccttcacccttccctccaccaggacttcatggtgatcctgccctgcctgctctgtagtatctcatccccctaccctgacaccaagttcccacgggccttccttctctgcctgctcttctgtcagctccctacagcatggccttgtttccctgggaacaatgtgtctgtgtcacagacaacaatgtcctttcatctcaggcacactggcgtagtgcaccctgggactgcacacaaagggtgctttgtgccacatgtgagcttcttgcttgccgcattggtgctgctgacccaggatcctgtccttgggtcctgattatacaacagtcagtggggctgtggtggggtgagctgctctccccgcgctccccctaagttaacccttctggtgcatctgctgcccagcagccatcctccctgcagcctcccacattttttttcccctcccagctgggcttcactgacttgaacctagccgagtttgcaggctcaggctccaccgtccgctgctgcctattggaaggatacgacaccaagaatacccgccaggacaactccatcctcaaggtactagggctctgccatctctgctgccttaacaaggggtagtggcgaatatagctcctcattagaaacacaagttctcagaaaggctgggccgatgctgggcctaagtctggtctcagttttctcatgcatagttgggtgtgaccccccaccttcccgaaagggcttgataagcacctttgtcagtccttttttatctcgtgaccctaactgcaagcacagtctatgcacgaggtgtctgttattacatccaactttgaatacagggagtggtgacaacctaaatcccatcatttgccctaggtcataagcagagctggcattaacccaccagtcatgtaaccgcacagcctaggccctaattgttgcccgacctgatctgagacctgctggctcctggtgagctatcagtgagcagaattcatgttctggacccatgtgcaccatgtagggatagcgctgtgagggctgcacggtttccaggagcccaggtagcttcttccctcaggcagctgcccatttgacgtcttaggaacaaatatccccggtatctgtactagcgcacctcttcatccctttccacaacctcttacaggctgaccaagaaagcaggtttccctaaaccccttgtctgagtggccagctgagcctggcacagagacggccatggggtaatcaacaggacctgagaaacatgcggataggttcaggctggtaatgtggtagcatgctctgtaatcccagaatttgaggcgatcatgggtttgagccagcctgaagtatatacagcaagacgatatctctctttttaaaaaatggtgatacatgtccttaatccctgcactcaggagtcagaggcaggtagatctacatgagttgtagagttgtgcagtcaggactacacaagtctaggaagaaaggaaggaaggaatgaaggaaggaagaaagaacgaaagaaaagaattgattggtggaaagtcttccccagtaggcctatgcactcacaacagtggaaagaggcctggggtcaggtgacctcagggtcatggcctgcccccctatatcctgtttgtttagttttggggagtcagttgttcttttagtctctttcgtttgttctttctttctttttttttttttttaaagatttatttatttattatatgtaagtacactgtagctgtcttcagacactccagaagagggcatcagatcttgttacagatggttgtgagccaccatgtggttgctgggatttgaactccggacctttggaagagcagtcgggtgctcttacccactgagccatctcaccagccctgttctttcttttttaaaatatttatttttaatgtatgtgagtacactatagctgacttcagacaccagaaaaggccatcggatcccattacagatgggtgtaagcccccatgtggttgctgggaattgaactcaggacctagtaggaagagcagtcagtgcttctaaccgctgagccatctctccagccctgttctcttagtctttcttgctaccctcaacctgcaactgcagtgccagccactttgtagactgctgtcatggctgagtgagatgatccacaagccctgagactgtggggatgctcacactgaggtcctggatggtctggggtctgagctctcctctccatcctcttattctctgccttcactccatctcagccgtatttgggtactcagactttaccatgtctagaccattggcagaatcattgcaggtgggtgtcaaattctatactagtggcatattttactttattttccaaaaacttttgcctggtggtggtacactcctttaatccctacactaacaggccagaggcaggtggatctgtgagtttgaagccagcctgatctatagagtgagtgccaggacagccagggttacacagagaaaccttgtctctaaaaaccaaaaagaaaaaaacaaacaaacctttcaggcagcccctgcctgatggccctgtgagtattgagtatcccttcttccttgtagggccccttgagtcctgttctccaactcaaagttctgttctaacacacctgggcagagcaaatgtactgaatatggcctctggagctcacagtctggttataatttatcattgcaggaccaacttgttccctcaggtgcatggtgccagccaagtgaccttgggtggtctgtcttagtcagggtttcactgcacaaacatcatgaccaagaagcaagttggggaggaaagggtttattcagcttacatttccacattgctgttcatcactcaaagaagtcagaactggaactcaagcaggtcaggaagcaggagctgatgcagaggccatggagggatgttctttactggcttgcttctcctggcttgctcagcctgctctcttatagaacccaagactaccagcccagagatggcaccacccacaaggggcctctccccccttgatcactaattgagaaaatgccttacagcggggtctcatggaggcatctccccaactgaagctcctttctctgtgataactccagcttgtgtcaagttgacacccaaaaccagccagtacactggtctgtctgtctgtctgtctgtctatctatgtttttcaaagcagggtttctctgtatagtcctggttgtcttgtaactcactttgtagatcaggctggctttgaactcacagacatccacctgcctctacctccagagtactaggattcaaggcgtgcgcctcactccccggcttcttccgcttgactactcattgtgtcctccacacaggatacaggcttcactgtgggcaggtatcttagttagggttttactggtatgaacagacaccatgaccaactcaagtcttataaaggacaacatgtaattggggctggcttacagattcagaggttcagttcattatcatcgagtggggagcagggtagcatctaggcaggcatggcacaggaggagctgagagttctgtatcttcatctgaaggctgttagtagaagacttgccttccaggcagctaggatgagggtcttaagcctatgcccatagtgacacacctactccaacaaggccatacctcctaatagcgccatttcctaggccaagcatacacagaccaccacagcaggtgacatgggaagggacagagttgggaccagagctcagaggctgccctgagttggtgttagcagctggtaatgatgtctaccttctacccttaggtcaccattggcatgttcctgctctctggggacccctgtttcaagacgtgagtgtcatcctggctataagtgggaacgggggctatgagatagtctttctttcttcaggttctggggtacccctggctccgcttgattctgaaattggagcaccccagtcacatacccctctgtcctcctaaggccaccgtctaccgccaaatccatctccatcccgggccaggactcctccctgcagctgacgtgtaaaggtggtgggaccagcagcggtggcagcagcagcaccaattccctaactggatcccggccccccaagacccggcccaccatcctgggctcaggtaccatcttcatctgcttatctctcccctgcctatgaccaccttctcccctgaacattctgtcccaggaaaatgcttatcaagaggtaggtgcaggcatggtaggcaagatgtcttcactcacaagacagagacaaaaggatctgtgagttccaggccagccagggctatcagtgagaccttgtttcaaaaagagggtgatagggtggtagaaggggcagcgtgcttctgctggttctgccattgatcgtgagtgaataccatgatagcttcaaccccacataccctcctagagctactcagtactgggaggtggagaagccccaaggtgaatagtgagcagatagcacatgtctggagctggccctccagacctgagacctagggtagacctaactaccagggcttggcttttccctacgcccagctttcttgcagacccagcatccaggggaggtccagtgcagaaagctgctgttgctacctgccttgacttgctgtgtataggcagaggggcttcccggcaccattgtgctctctgtcttatggaggctggtgagcagaggagacaaggttatctcagcacaggagttgcccttgagtaaacagttctgttctgggcagagtagtacttgaagacccatgtgtcttagcagctggttcccctgcctgccacatgcacaaaacatgttgagaacctgagctggcttagcccatgtgtatcatcccagagtgggaaggtagaggcaagaggatctgaagttcaatctacatagtaaattcaaagctggcctggactacagaggaccctatcttaaaataaaaaatgggcatggtggtgcacatctttcatcccagacgtcagaggcaggtggatctctgagttagaggcagcttggtctttatcatgagttttaggtcatttgccgagtgagaccctatctcaaaagaccaaacaaaaccctacatggctttggttggaatccgggcagaccagatttcatccagtagcctggttgtttatacacgctcatctccagtggaggaggaaagggtgagtccggtcctccccttctgtgttggttggcaggactcggatgtatgcattctaggtccatgcctaggcccacctagttctcttgtgtttacagctggggagcacaagggaagtttgctttgaaatgacctggagcatcctccacccagacctacccttttcccagatttgtccctgaacccaagctcttgtcagttttaaggcctttagtatgccatcccacatggaagaccctgtgcctgctgcctgcgtctcccctccttggtgtcctaacacggcattaggtggtctgggaagagccttccctgatccacagactgaccaggccttgcacgtgtgctgctttagcgtcacaccactcaccatgattgtagataactggctaaaggtctgtgacagatgtattcccaacagctgtggaatgggttacctgggtaccgagagtagcatgtggcttatagcagattgctgcttctctagcccttggtcttcagtctgcagaatggagtcacagtgccccatggaaggcttgttgaggttacaagtgaggtagcaccttaatggagctttgcgcctctccccaggactaccagaggagccagaccagagcctgtccagtcctgaggaggtgttccactctggccactcccgcaactccagctatgccagccagcagtccaagctatctggtgagtggtcgggacctaaccctgggacctcccacagccctgggcccctgtgatcacctccccaatattgtccaccccccaggctacagtacagagcactctcgctcctccagcctgtctgacttgacacaccgcagaaatacatccaccagcagcagcgcctctggtggcctcagtatggctgtagagggtcctgagggcatggagagggagcatcggccctctgagaagccacctcggcctcctgagaagcccccacgccccccacgccccttgcatctatcagatcgctcttttcggtgagtctcattgtttggggctgcctggtaaacagttattccagtgctcccttcagtgctcccttcagtgctccctgcagtgctccctccagctctttgcatctgcccacacagggttagacagagtagagtctccatctcagcgtgccaaatgattatgctgtaaccaagggctgagtgtaaaagtgctgccgggggtgggtctgtgtgtaatgtgtatagacacgacacaccttgtctgagcacacaggtagtttggcttcagggaggctccttagccccttagtcctagtctgttgcttgtcagcaccctcccctgagatgaatgaggtgaaagggtggctaaagtgaagtgcataatggggtgtgcataaaatgctttagagttgtaggtgctgggagcatacttgtcttgctgctgaacttgtcactgtgccgtcataattctgtccctctcccccaaggcgaaagaaagactctgtggagagccacccaacctgggtagatgacactcgaattgatgcagacgacattgtggagaagataatgcagagccaggacttcactgatggcagcaacactgagggtgagctgctcactccaagccagctggggtaagggtggcctccagaggctgtccctgtctgtccctcttagcctcatcctcccttttgtccccacagacagtaaccttcggctgttcgtgagccgtgatggctccaccacactgagcggcattcagctgggcaacaggtaggggcggggacagggaggtgagacaaccatgggatccccagcttcaaacattcttgttaccagtgaccttgggccccaccaccttcagagtcctttgctaactatgccttcccataggcctttgtacaaagtgatctgcagtatttatggttccccaggcctttgaggcagtgagtgagagtagtgtccagtgtgcaggggcgtcctggggcgtttccttgtgttcctgggagctaggaacatgtctttggaacttctgcatccagagcacaaaaactttggagtatgtcttgtgctgctctgctgacccctgttggctgagactagaaattacaaccaccctctcccatcagtcctgggctgcctagggtggaagagcaagaaaccacaggaacctccttaggccatttgcaaaatgagaagccaagattggaggagggaaactaacctggaggagaatagatgtggccccttccctttctcctgccttcttaatgaatcttagcagtcctccaaacctgttttcatttgtcagatgacacagggaacagtttctccttgccagggtcactatgagaggactggtccacccaggtgggtacacagcaggtgtccagaggggaccaggcacagctgtggaccccaccatcaccaccaccactaccaactctgatgctatttctgtcaccctgagcaaatgactgaacacctctggggcctcagtttctgccggactgttaaagactggcagagtaactgcatgtgaagctctctggccaggggattgctcggcaactgcaatttctcaactgctcacctttctccaccctgcagagtctcctcgggagtctacgagccagtcgtaattgagagccactgagggacccaggagtccggctgaagaagggtcctgccatctctggcacccaggcccgtggcattcctggaggatctgctctgcattgcatctgtgcctcctcttactctagccacactggcccccaaagcgtcattccattttcctcccatccaccctggaaccactggtcctgggtgccactgtgaatattgtcctccgaaccactagaaaatggggcaagatggagctggccaggactgccctgactggagaggacctgggcccagcaaaggacacagccattccatgttgggtgcttgtggcctgccccatccctccatcccccacgacccacttcaggagcagcagcttcagccaggctgacggggcacttgctccattgtccctgcccttcacgagctgggccaccccagaaccctgccacctgtgaccctctgcttactgcttcactgtcttttctctatcctgaggagacctgcaggcagctctctcctgggagctaagacctcaaaccccacactctggattgagaccccacctccttaactgtcctcctgctgccctgcagcctgcactttgcacatgcttgtccccagcacagccaccggcccttgcccttctccagacctcctgggtgctgtctgctgtgcaaccagacctagggtacagtcgcccggctggaacgtggnnnnnnnnnnnnnnnnnnnnccccttccctctaattaaccccaaactcagacccaagaccggagcctagaagggcctgagcatcatggttccatctgcccagggctgggtcctgagcagctggccttcctgcaggaaaggaaggacgaggcccagccgtgctgggtaagcaaaggccttttcccctgctctcatgtcagccggcctgggctgggttccaggctagagagtcagccaggtggcctgtgactgggtgaactggagctggcttcctgccagacgagcctcagccctcctgggcaaggggtgtgctttccctggggagtcttccccctactactcaccctcttggtacctccccaaccccagcactttctgtcctataatttgcttaaggagagtataggctgccagctcagccctggataaattcccacccccttaagtttcactcactttgtatcaacccagcaggctggtgtttccttggccccttaaggtgtttttcctcctgagttcacagttcttgtattccttccaccccaacaaggggagataggtgcctctgttccccattccacctgcaccccagcagggctggggataggcgagtatgggacattgtttctgtgggtggggatggctggactccccaggttgggaaggtccttgcctagtttgtgtcttcctcagctagcaaaagttggggctgtggtcttagagctgcctggtgtcaggaccagatcatttctataggttctgtagccgttgttttaatcagcagatgaatgttagaagatgctgccaaggcaaggcagaacatggctagagaaggttccggcagctcagattccatcctgcccagcaggtgcctggcactttaagggactctggcagctctgttcctaggtgaggtgaccaccagaagatggacagagccctagtgtgcttgtctactaccttccccagtcagcattgttttggtctagttctaaattccagggctccaaaccaagcagttggtactgtcaggaagactgccccaaaccaagagcccctgcctaactcaagccaaggtctgggactggatggccactccagtagacgagagctgccacatcctctgcttccaggcactgggccaggataacttagctgaaaacatgaccacaaccaaatgaacactggtggcagccagaggctaagagcctttcctcctgcgctcagtgatccccacgggtgcccagagcacctggacttcaaattctatatacaaagatagaggatatattagaggtatttttgaaaaggaattggtctatgcaatgccagtttgggacctgtaagacagtttaatgtttctattagagagatataaaagatctgcaatatttttagggttcttttctggttaccctacagctgaccacgtggtctggcaggatgagcaggcccatcttcttctgtggggagaatttgcttttgtgttattcctttctaaccaggttaccactgcaccccattccgtgggctgttcatatctgtctcagcttataatagaaaattatgtcatatggggaaatcagcctagtgtcaatgtttggtttgggggtggaattaaatgccgatgtttttgttactgctttttgttggtgtttcttttcattctcatcaccgtgttgacttgggggctgctaacaggagttagccatgtatgtgtaagatgacatgctggggaaagtaggttagtgttctccagtctgaccccagtcataatgctcaccacaaacacacacatacatattacatatatgtccacacatgtttgtatgaatatgaatgggcacttgacaaaggtcggagaacacctgttactcctgaacctcttcttgtttgagacggtgtctcactctggttttggggaaagaataaaacgtttttatttggtatttataaggtttcctttagccatgaggtttaaggagacctactactcctcatgcctccagagtgttgggactacagaaatgcaccaccatgcccagcatcaattcggggatcttaaagccccacttttggtcctaatcatcgaagaaactggttaaaaatacctgtcagggcacaaagagggagctgttgcctctggttgcagaaatggataacctgcatggtgtagcatttggagaagaatggatctacagcagctagccccatatgccatgagagtagtgttctgggtgagaaacagaagaaaagcatgaaagataatttggcccagcgccccttggttctaagagggccattctgaaacctctggcagtggacaatgaagggaagcctagaaagttccctaggaagccaaccagtggaaattctcataggccaggccagtggtggtcattctatacagactcttccattaacagtttcaaggccagaatgtagagcctttgaattctgatgtctgcttcaacaaccaactcattatgatctatccctttccgggacttccaactctggggtacatctcactctggcttgggactgtaggataatgtttaaatgattattgtttgggaagggtctgacagggatgtagccacaaaaacctgaaagtctgagctcccggccctacagttccctgcagaaactacatttcccgacatgcactggagggcggggaaaagtgcccgcacgtcagctcagacgagtctccgcgtgtcacgtgatttacaagccggaaaggcctaaaccaggaaccggatgtattttgttgctccggcggaacgctggagagatggtgagcctggggtggagtacatgtgtgatttgagggtaccaggggtcggggctctgagtaagagtctccttgggagatggagttgggctctccaaacccagatcgctctctccaccgcttgcagacaggtgacacgaggcctgacgtggctttctaaacccgagagccacttctagtaagccctccgtggttctaaatgaatgagaggtttggagtgtaaaccggctgctccgaccctccgttagtgcttgtacacgagccatctcgcctgctgagcctttatttttctccaggccaccgggacagaccaagcagtaggatttggccttgtcgccgttagcttgatcatcttcacctactacaccacttgggtgattctcttggtatgtgtgccccacccccaccccgctcaccttcattttgctctggatctctaagccagtttcctaacgcgacttaatcagcgtctgtgtgccagcgtctggatgtttagctagctctaatctcacgaaatctacactatggtgcttgcagatggtgtctacattttatagatgaggaggctaagactcggggagaaggctgtttctcagcctctgaactgccgcacagtgaggctttattttgtgtttgtcctcctggttagccagcaggttcctgggtgtagcagtcgccggtggagtttattaacatctcaagtctctctctctctctctctctctctgcctctctctttaatgtgggaaattttgttagttattgttttaaagtacactgtgcttggaaaggggcatcttgcagtacttggtatccttcagagaggaaagttaggtgggctgaccttcggtgatgaagagaactggctgattctccagaggactggggttcaagttccagcacccacatggccagctacaaccatctgtaactccagctccaggagacccagcaaaagtccctggaacggaacgccattgctgcttaagttgtgttaggagttagattggagatccagggcttggatgaaagtacacctggactcacaggcacaaatgcatgatcaaaaaataaagacctctttaaaagacctagagttctcagaaggcagaagaaggggggagggcagcttggtgaggtcagccagggcctcagaaatcaaaaaggatggtttccagcactcacaaggcccaggcagtattcaacaatacagagacaatatggtgggtctcttgttatgatacatatccacgcttggggatgctatcaaggtgggccctcagtatccagtgctgccagggggaggtgggacggcttccctttggggctgagtaaggtgagcagtactcaccagagctcttgcccttggtgccagccattcattgacagccagcatgtcatccacaaatacttcctgccccgcgcctacgccgtcctcctcccgttggccgcaggcctcctgctgctcctatttgtgggtaagtctcccgatctggggcagggtgtctggaaggcagcgtgcttccacatgctggcacctgctgtacatctgcttagactctccttgtcaccaatgctccccggggctttcctattccttaaaggccacgggcagaagctcctctagtggtgttcccagttttcaggttcctggggcaatgaggacatggctcccctttctttcctgtctcagcttcatcttcatctcttcaatgttcctgcctcaagtcaccctggcatctcttacggctctgtgggttgggaactgtgtctttgctgttacgctattctaagctctagcccaggagcctaaaagagtgcttgggttgactgaggaaccacatggccggatgatgcacaggtggttagccttgcaccattttggtgatagttaactgaccctcagtggctgtgtgacctagtgaatgactgcaaagatgcacccctaggggggttggttgggagcctgaccttgcatgcctggccacctagcttccactccaatcctcccagtccctcctattctgtgtattacaggattgttcatcacctatgtgatgctgaagagccagaagataaccaagaaggctcagtgaaggtccagcagggatgaggctgtaggggccttctccatatctcctccagaaaagggaccaagggtcacagcttacaagatggtcaagctggctgcactgcagccctctttgggacatggggctgttttcttctcagtttgacaacctggagccctctctctcttggtcatccttttagaagccaagagaaaggtgggttgggaagcctctcacttcccttaggctcagaggctgaacattgctggttggtcctgtccatctcacagtcaaagctccctgtcccttccaccgagttctctcctctcacctctgtgctcctcccactgtgctgatggattgagcaggccttcccgcctctctgtacaagtcctgtcccgtcacaaggcagctcttccgagtctgacacttcccaggctccatgaggacttctggacccaggaagccctggggaaagactgacaaaccccagaaccacagggttacatccaggcagccacactagaccacaattggcctgtttgggaaaacttacaaataaatgttaattgcgttggtgtttgtctctctgccatccttgctctggggaaactggctagaggaggctcagatgctactgagttgtgcaatgagggcacctcaggttgtacatttgcgatgtccctatgtcagacacagggtaaaactggaactgggatagatatgattcttactcgggaaatgtcacagcggagaatcagaagcctggcgcatctgctaaggcctagtgtagcccagtctgacattaaactacatagctgagggtggccttgaacttctgatctttttgactctatatccccaaggttaagataccacatgtcatgagggctttatgcctgctaggcaagcactcttcctaagatatctccagctccagcccctcgattcatatttaagaggcccctgggatgcctctctagaagcttaagcttgtgtcccttaccctggatatctacccctatctggcatccacacagcctgaaagtgtatcacttctcaggccctctccagccccttctcagatacaaaaccacccaccttctcttttcctccccgctgacctttcccttccactctgggttccttcatcctgatggcttcccaaaaatacatatcaggctggctgtggtaatggatccctttaatcccggcattcaggatttggaggcagggggatttctgtgagctcaaggtcagcctgatctacacagaggaacacaaacatgaagaaaaaagacatatggacctggagagatgtctcagcagctatttcagagggccagagttcagtcagaggtcgaattaagtgaccaccacccacaactctggcaccagaggacacttctgggtgccactggcatccacacacatatgtgcccagacgtgtatatgtataattgtaaagatgaatagaccttcttaagccagcatatctaagcatcttctgctcgtttctagttctctgggttattcctcccactgtcccaaggctctgcgtgctagggactatcattactacagccactgtggtctcttggggctccgcgctcccaccccctacatcattccaatccacacagttcccaagtttgtgctgggcactgggcatgtgaggtccatgtagtccccactctggtggcactcccaattcaggaggtttgatgtaataaaccaatccatgagcaagacaatctctgctcatgccaagggtgatgggaataaaggccatgatccagtgtatggaagaagtgcatagagtcctgaaaggtggtccgaaggatcaaggcaagtaaaaagtccagacaggactgatacttgggagcccaggaacgggaaaccctgggggtggaagtttgcagcttgggttgagggcaaggagggtgtttggagtgagtcaagagagtggtgactcatgccatggtgaggagtttgaattctgttccaccgccaagagacgtcactgaatacttaaagtataagggtgacatcatcccatctatgcttttaaaagattatgttgtgtccctctagctagctcaccaaaaaatttctggtgtctgttcccgctgtggcctccagtgggcgcttcaatcacacggaaggatgctctgacttctgtaccacctggagatggtcacttctttctctgcttttagcttctttacctgagagacagccaatgggaatttcatgcctaaaaagacccaagaaacacgatttaagctacctgactccacagccagtcctagagacgtacgtccacagttcgggaggaaattgagaggagaatcatttctccggcacctccaccaaaacccggcgacctcgcccagccagaaccgggattcagaggatgctgcgtcctcggaggggggacccaagggcaaaggccagcgcccccctcgcagattccgtgcaaagcgtgcaaccgcaacaagaaggcattttctcaggcacctcagccatcgccaggaggctcggtccgaccacgatcaggatgcagaggatcctacatcctcggaggggggacccgcaggccaaggtcatcgtccccctcgtgcaaccgtgacaaggcctttccaccaacacctcagccaggcagctctgaagggccaggatcagagttctgagtatgctgcatccgtggaggtggaaccggcaggcaaaggcaagcgcccctttcgaagattgggcacagtggtaacaagagcgtcgcgattggtcgttcgccatgcagaggcggggcctgattcctgcatctgggcctccgagacaccgccaaagccagagaagcggcacctgggggcgatggccacaccaagccttaggtcccacgaggtaggtgcggaccagagaggggacaagaaagggaagggtgaaagtctggccattaccttggccagaggcttgaacacccccccgccccgtctctgctctgggaagatcaagacacgccccacggaggtatgaaagggggtagcgatctggtgggtgtcccccggaggtcttcctcagtttcctcatcaggaaaatttggatgatgagataaattccgtaaggctccataaggacctcaagcgctcagctttgtacacaggatgggtctccagtaggaatgggtgagctggtatgacttcagcttccatttgacctggtccttcttgctagcacagagaagcacagcatagaagaggaaacagggaagactgaatctcccagcatcccagcgcctgctagcaaggcttcttgtgaaggcagctcagacgcaacagtagcagctaacatgtaacagaggagataataaggctgggtctgacctaaggtcatgcagcctctgggagtcatcagatgcacctgggattgacagcagaaggctgttcccactccatttgcataccatttgcaggtggttttggcccctcaaacactgggactatagctatagtgttagccctgtattttatggtcagggaaggtgaagcagagaaagataagcagaagatccctaatcggtggaagtaggatttgaacccatgcatttcccttctgaaatactgccacatgctctttgtttcttgtgcctcttcccatcagatcccggcccactcccaggaggctggaaacaagtccatttcctcagggagccgccgcggccttctttggcacctccgagccaggcagtctagagttggcctgtttgaggtcggtccaggacatgagctgcatagaatgacacgaatgatgcaggaagggctgtgggctgccacccaggtctccaagaacaacccacccacggtgaatggcccatcctgtctcagacacctcaaacctagctggcagtctatctcactaaaaggttgacactggtaatcagagaggcctaccaagaagaggaaggcagggatttgtgtcaggaagcagaaattctgagttgaaaagctggaagagaagtccaggaggtctgagggacaccctgcttaaagtggtggatgtatggcctctgtctctctgggcctcaagtacccctatctgtataatgggtgaagcccctgggccctaccagcttgaatggttaagaagggacccccacccccaccctgcccaatccagtccatcctccctggagcctgtcaggctggggccaagctggctcagcagaaagcatcacccagctgctaactcagcagcccagtcgcctggggagcctttatgttgtccgcgtgtgtgcacgtatgcacagttgaaatacaagatctggagggggttctctggaacatagcctgaccctcatcacctgcaggaagtatcctcgggactgaacacagcctggagatatggctgcctacagagctggctgttgtagcctgcctctggcctccagggcacttccagaatggggtttctcctctccacacaccttcagatttccactcagaggtcacctgccccgggcacccttccccagtcagactctccgaggctttcccctggcatcactggcccctttcaggaggatgcaatctggctgtacacagcctgcatgagtatttgaaagtatgcaccaggcttgaacttggtgcctggtcctgaagatccagatgtgggtgataacgcccatggggccctgccttaggtcatccccatccttcctccagccctgggtgaaccagaatctcaagcgcccaatttaagctaacaagacttgtcagttccctgtttgctaaaggaaagggcaaggccccgtgctggacacacaatctaggtaggccatagcagacccagactttctctgaaacccattaccaacccctgcagggacctactacccagaaggattacctggaagtcatgacccaagttcacgaagaggtaggaagtacctaagtggtggggtctctttgctttagctcccccctcctcagctgtgagtgggagtgatggctagttcccaggaccttgctgggttgacgctccctagccagacccagctgcatgcacctggaccctgggcccacaagggtggactcgcttgggccactttctcccctacagggcttcgagctgggcaccttggctggcccggcttttgcacggctgaggaaatccattggcctgactgaagaggactaccaggctactcttggccctggtgatccctaccttcaattcttcagcacctccaaaagcaaggccagcttcttcctgacgtgagcttgtagcaaggatggggcaggattggggctccgttccaggctggcaggatggctttggggagagagggtcagggccagaggaaggtgagatgaagcaagggggcgaggtagccagacacatccatcctgtgcaaaagcaggagcaagagacttggtgggaaccattcctgccaagtctggacagtgaatgacctctgttcccacctatagccacgaccagcgcttctttgtgaagacccaacggcgccacgaagtgcatgtgctgcttgcccacctgccccgctatgtggagcacctgcagcaatacccacactccctgctggcacggttgctgggtannnnnnnnnnnnnnnnnnnnnnnnnnnnnnnnnnnnnnnnnnnnnnnnnnnnnnnnnnnnnnnnnnnnnnnnnnnngtcttaaactgcagagtgactggggagggcggatcctggggcggggcccaacgggaccatgtcgggattggagagtctggccctgtttcaggctgggctgggacttcatccaggctatgtctgtggtgctggagacaccgcggtgccggagacgcccaattgagaagggactctgggggtggaacctggagggacaggctcaggtactcggtgggtcttgagaaagatgcgaaacctggctccgggattgtacagttagagataccttctcgtctttcaggcgtatacagtctgcgggtagctcaggggaaaaaggtgagtgtagcagacagaggtggctcagcagtgggggctgctggagggtgagctcgggcttccctcactcctgacccctgttcccagaagtacttcatcatcatgcagtgcatcttctaccctaccagccgcatttttgagaggtgagtcccgtccgagtggatatagggttccagtttcacaggaaaggtgcaggctgagacaccaatccttatccagtagaccgccaaacagacccaggaagaacagatcttttgagcggctggccggtacttggggatcaaaaccagtgctttcgtacaggctaggctcaccactgaaccatatctccccccagagctttattttattttagattgaaatagtctccgtagtccagattagataccaactttctaccctgttgtctattccagtactagaattctgggtcatcacaccgggctaaccaccctcattttatagttgagaaactgaagaaggctaatggattcagggaaagggacaggtgggatggttcagtcagaaaaggtgcttgcagccaaacctgaggacgcagttcagtccccaggaccctcatgatgaaacaagagaaccaactctttcaggaacggtgctcttaaccgtttagttatttagagataactaaatggagctagagttggagaacaaacccaacctgctggtaggatcctcccctggcagacaagatactgagacaggtaagtagggctgatacctaggttgggcttgtaaaggtctgagttcaaa

SEQ ID NO: 1189 - DNA, 4249 bp, Mus musculus
gccgcggctccgcgggcggtcgcgccggggcttcggcattctccgagcagcgccgagctgcgtcgggctcagccggctgcgtccggaggtgcgggcgacggcgccgctgtgctccagcggtgctaaccgaggcagaagccatccggccgggtcggaaggcgcctgagactcgggcagggcaggagcggcgtaggtcccaggactgagcgggaggcggaccggcacacgttcccggcccggcagagcctcccgaagcggtccctgcagagccgggtcggtcgccgaggtggcttccgcttcccggggcctcacctgcgcaggccgcggtgcgccaggtgcggaggcgtgtgcgtcgcctgggcacctcccacggcagccagcggggcggaggcggggccgccgcccgggtctccagcggttcgcccggccgtctccgtcagtctcaccggtccgccgggccccgcggatcgggatgctgctgctcgcttgcgagccgccctccacgccagcccccgctgccggggccgcacctcgctgtttacatgtcagtggagcccgggttccccgagggtgagagcagccggctcactggacctggggctccgaactcagatcctctcctgcccgcagcctccgccgccatctggactggatccagctctggtgtttttgaggaggggggtgtggtgtcgggaaaggaatcctggggttttctagtatccccttctttttttcttttttcttttctttttctttttggccctgcgggcttcagactcagggaacttgctcatggcttttttgatgaagaagaagaaatttaaatttcaaaccactttcaccttggaggagctgactgcggtccccttcgtgaacggggtcctcttttgcaaggtccggctgctggatggcggggattttgtcagcttgtcgtccagggaggaggtgcaggagaactgtgtacgatggcggaagaggttcacctttgtgtgtaaaatgagtgccaacccggccacaggcctgctggacccctgcatctttcgagtgtctgtgcgcaaggagctgaaaggtgggaaggcgtattccaagctgggcttcactgacttgaacctagccgagtttgcaggctcaggctccaccgtccgctgctgcctattggaaggatacgacaccaagaatacccgccaggacaactccatcctcaaggtcaccattggcatgttcctgctctctggggacccctgtttcaagacgccaccgtctaccgccaaatccatctccatcccgggccaggactcctccctgcagctgacgtgtaaaggtggtgggaccagcagcggtggcagcagcagcaccaattccctaactggatcccggccccccaagacccggcccaccatcctgggctcaggactaccagaggagccagaccagagcctgtccagtcctgaggaggtgttccactctggccactcccgcaactccagctatgccagccagcagtccaagctatctggctacagtacagagcactctcgctcctccagcctgtctgacttgacacaccgcagaaatacatccaccagcagcagcgcctctggtggcctcagtatggctgtagagggtcctgagggcatggagagggagcatcggccctctgagaagccacctcggcctcctgagaagcccccacgccccccacgccccttgcatctatcagatcgctcttttcggcgaaagaaagactctgtggagagccacccaacctgggtagatgacactcgaattgatgcagacgacattgtggagaagataatgcagagccaggacttcactgatggcagcaacactgaggacagtaaccttcggctgttcgtgagccgtgatggctccaccacactgagcggcattcagctgggcaacagagtctcctcgggagtctacgagccagtcgtaattgagagccactgagggacccaggagtccggctgaagaagggtcctgccatctctggcacccaggcccgtggcattcctggaggatctgctctgcattgcatctgtgcctcctcttactctagccacactggcccccaaagcgtcattccattttcctcccatccaccctggaaccactggtcctgggtgccactgtgaatattgtcctccgaaccactagaaaatggggcaagatggagctggccaggactgccctgactggagaggacctgggcccagcaaaggacacagccattccatgttgggtgcttgtggcctgccccatccctccatcccccacgacccacttcaggagcagcagcttcagccaggctgacggggcacttgctccattgtccctgcccttcacgagctgggccaccccagaaccctgccacctgtgaccctctgcttactgcttcactgtcttttctctatcctgaggagacctgcaggcagctctctcctgggagctaagacctcaaaccccacactctggattgagaccccacctccttaactgtcctcctgctgccctgcagcctgcactttgcacatgcttgtccccagcacagccaccggcccttgcccttctccagacctcctgggtgctgtctgctgtgcaaccagacctagggtacagtcgcccggctggaacacccaagaccggagcctagaagggcctgagcatcatggttccatctgcccagggctgggtcctgagcagctggccttcctgcaggaaaggaaggacgaggcccagccgtgctgggtaagcaaaggccttttcccctgctctcatgtcagccggcctgggctgggttccaggctagagagtcagccaggtggcctgtgactgggtgaactggagctggcttcctgccagacgagcctcagccctcctgggcaaggggtgtgctttccctggggagtcttccccctactactcaccctcttggtacctccccaaccccagcactttctgtcctataatttgcttaaggagagtataggctgccagctcagccctggataaattcccacccccttaagtttcactcactttgtatcaacccagcaggctggtgtttccttggccccttaaggtgtttttcctcctgagttcacagttcttgtattccttccaccccaacaaggggagataggtgcctctgttccccattccacctgcaccccagcagggctggggataggcgagtatgggacattgtttctgtgggtggggatggctggactccccaggttgggaaggtccttgcctagtttgtgtcttcctcagctagcaaaagttggggctgtggtcttagagctgcctggtgtcaggaccagatcatttctataggttctgtagccgttgttttaatcagcagatgaatgttagaagatgctgccaaggcaaggcagaacatggctagagaaggttccggcagctcagattccatcctgcccagcaggtgcctggcactttaagggactctggcagctctgttcctaggtgaggtgaccaccagaagatggacagagccctagtgtgcttgtctactaccttccccagtcagcattgttttggtctagttctaaattccagggctccaaaccaagcagttggtactgtcaggaagactgccccaaaccaagagcccctgcctaactcaagccaaggtctgggactggatggccactccagtagacgagagctgccacatcctctgcttccaggcactgggccaggataacttagctgaaaacatgaccacaaccaaatgaacactggtggcagccagaggctaagagcctttcctcctgcgctcagtgatccccacgggtgcccagagcacctggacttcaaattctatatacaaagatagaggatatattagaggtatttttgaaaaggaattggtctatgcaatgccagtttgggacctgtaagacagtttaatgtttctattagagagatataaaagatctgcaatatttttagggttcttttctggttaccctacagctgaccacgtggtctggcaggatgagcaggcccatcttcttctgtggggagaatttgcttttgtgttattcctttctaaccaggttaccactgcaccccattccgtgggctgttcatatctgtctcagcttataatagaaaattatgtcatatggggaaatcagcctagtgtcaatgtttggtttgggggtggaattaaatgccgatgtttttgttactgctt

SEQ ID NO: 1190 - protein, 388 aa, Mus musculus
MAFLMKKKKFKFQTTFTLEELTAVPFVNGVLFCKVRLLDGGDFVSLSSREEVQENCVRWRKRFTFVCKMSANPATGLLDPCIFRVSVRKELKGGKAYSKLGFTDLNLAEFAGSGSTVRCCLLEGYDTKNTRQDNSILKVTIGMFLLSGDPCFKTPPSTAKSISIPGQDSSLQLTCKGGGTSSGGSSSTNSLTGSRPPKWTILGSGLPEEPDQSLSSPEEVFHSGHSRNSSYASQQSKLSGYSTEHSRSSSLSDLTRNTSTSSSASGGLSMAVEGPEGMEREHRPSEKPPRPPEKPPRPPRPLHLSDRSFRRKKDSVESHPTWVDDTRIDADDIVEKIMQSQDFTDGSNTEDSNLRLFVSRDGSTTLSGIQLGNRVSSGVYEPVVIESH

SEQ ID NO: 1191 - DNA, 60420 bp, Homo sapiens
tctctcataacatatgtaactgtgcagagaaggtatcattatctccattttacgggtgaggacactgaaaggtgaagggtgaaagaggttcatgacttgcttgaagtgatagggccaaggtgtggcagggctgcagtttgaacctagggcactacaggtgggagaaagttcctgggaactgtgtgcactaaagtattttgaaacctaggtggcaggtggagaaaggaaacgtaaagggggctaaattcctgaattccagggggagacaaaggctatgtggggagctgacccctggagtaatcacatcatccttcaacaccttccatggctccccattaccttcaggataaaggactaaaggacacatccttttttttttttttttgaggtggagtttcgctcttgttgcccaggctggagtgcaatggtgcaatctcggctcactgcaacctctgcctcccaggttcaagtgattctcctgcctcagcctccctcccaagtagctgggattacaggtgtccaccaccacgcccggctaattttttttttttttttttttttatggagtctcactctgtcacccaggctggagtgcagtggcacaatctcggctcagtgcaacctccggctcccagattcaagcgattctcctgcctcagcttcccaagcagctgggattacaggcacccgccaccactcccagctaatttttgtatttttagtagagacgggttttcgccatgttggccaggctggtctcaaacccctgacctcaggtgatccacccgcctcggcctcccaaagtgctgggattacaggcatgagccaccgtgcccagcctttttttttttttaagagatgggatctcactttgttgcccaggttggagtgcagtggctgactacagcctcaaactcctgggtgcaagcgatcctcctgcttcagcctcttaaagcattgcgattacaggcgcaagccacctcacatggcctcaacaccttcatatggccgataagcccctctagtggaattgggcctgtttcatttccagctttgctcatgcctctgcagatcatgggaccctctgtcttctgctgcaggtcgactcagactgtcttctccagcggctccctgctctcctggctgcttctatccactcatcaggcttgggcttacatgtcacttcctgagggaagcctgccctgaccacccaccccaggcagaccttctctgtgttcccattgctccctgaaccccagcccccaccaccctaactaggtgtatcacaacagtcatcatttgggccacatccatgtatccctcattgtagccccagtcccagagcagatggtcggataaacacctgtgaatgaaaaatgaatgaatgaagtgagtgaatgaagtggctcagcagaccttagaaggctggggtaggaggcagacacagggtaaggctggggaggctgctgggctgacctacatattgtaggaacgacagtaatgctagggcagggccagctctcagaggccagaacacaggctggagagtttggacgttgccctgtcagcgatatggagtcccaggctgaggcctgctggagctggattaggaagggaaagctggcctcccagctgaaggagggtagctctggagaaagccacccaggggtctctgtacacagtgtaaacagggccaacatactctcatgtttcaacctgggaatgtggcctgattttgcgctgttgggtcaagtacagggcctggaccttcacacacaacccacaaaccaaatttgtagaagaacctcaggaagcaggggctgttgtgagcctcactgaacaaatggggaaactgaggcccagagaaatggagtgcctgacccaagccacacagggactcttcatcccctaatagcaactaggtattgcagcttgctcagaaatgtaggccatctacacatgtgctgcccaatagtcattggccatgtgtggctacttgaatttaaaattcgaattaaatgaaatttagaattcagtttctcagtcccaccaggcacatttcaagtgctcaatagccacatgcggctactggttatcaaattggagagtgcagatatggggcatgtctgtcactgcagaaagttctttggacagtgctggtctagcccatggaggtacacaggtcttcctcctgactctcaatctagaattatttccactgaagtagattgactcctctctcttagctggggcttcgtaagaggcttctatggggcaaaaagacaccataaaccaagtctagagtccgggaaaggtgacacacgcctgtaatcccagtactttgggaggctgaggtgggaggattgctggaggccaggagtttagaccagcccgcgcaatataatgagactctatctctacaaaaaacaaaaaattagctaggtgtggtggcacacacctgtggtcatagctactcaggaggctgaggcaggtggattgcttgagcccagaagttcaaggttacagtgaactatgatcgcaccactggactccagcctgggtgacagagtaggaccgtgtctctaaaaaataaaataaaaaataaacaaagcctaaagataactaagtggaagcagccaggtgcggtggctcatgcctgtaatcccagcactttgggaggccgaggcgggcagatcatttgaggccaggagttcaagaccagcctggccaacatggtgaaaccccatctctactaaaaatacaaaaactagccaggcgtggtggcgggtggtactcatgaggctgaggcaggagaatcacttgaacccaggaggcagaggctgcagtgagatcacaccactgcactccagcctgggtaagaggaaaactccatctcaaaaaacaaagataataagtagaagcaatactttaacatatacaaagttgaagtccacaatatgtaataagccactacaaataaataacaaaaagattatttcccaaatttaaaaatggacaaacaaaagatgtggacaggcaatttatagaagaaattaaaatcaccaaaaaatatgaaaagatgatcatgaaagaaatgcaagcactataggatagcttttttttcctcttttggtcaaacagattggtgaagatggagaaagtgtgggaatggccgctttcttatactgttggtgggaatataaatgtgtgtgatctttttggaaggcagtttgtcaacatctctcaatggtaaatatgcaaatactctttgactcagtaatccctggaccggaacctagggccgcctgactccacatctcgtgttctgaaccatgactaccctctgtgagtgatggtcaggcttgggttggaaagggcagagttggctgatcaacagggaaacttgtggatttgaccgtgggaggcttaatcaggacagactgctgtgggcgagttctttgtggcctttatcttcttgtgtgactggctcagatattagcaaggagcccagcacaaatcaatatgcccttggtcagctgcttcggtggctcgcctgccattccagttgtgcaaataattggaggccagtcaccggtgaatcagcactgaccgcccttggcaagcagggctggggagacaacttggcatggcatggctgtgaagcaggcactgtgctgggtgtcaggtgcctgagagagtgggccagctgggtggctgccctcaaggtgacttgggcaagtggtattccctgtccctacctcagtttctcttttctttctctttctctccttcttctctcccttcttccctcctgccctccctccctccctccctcccttccaatgagaatgaaatatgcaccagctatggtggagacagaagacagaaggctaagccctcattttctctgcatacagatttttggtgacatgagcacacagagcagggagtgggcagtgtaactgatggggggataggatgggcggggatgctggagctaaagctagacattgagacattgagtaggtgtccccaagtgggcaggagggtaagcccaggacctgtgggcatcagggctgcaggggcccaagggaggcagtcagggacgggctgagcggttgcttccagagggtcctgaatgccaggctaagaaccttggattttatccggagaatgatggggaaaggcttttgtttataatattcttataattatatattgttaaattataaaacaaattcatcttacaaaaatcaaacaatatccaagaatattcttttttttttttttttttttttgagacagaatcttgctctgttgtccaggctggagtgcagtggcatgatctacactcaccgcaacctccgcctcctgggttccagcaattctcctcctccagcctcccaagtagctgggattacaggcacctgccaccatgtccggttaacttttgtagtttgtttgttttttgagatggagtctcgctctgtcgcccaggctggagtgcagtggcgcgatcttgactcactgcaatctctgcctcccagattcaagcctttctcctgcctcagcctcccaggcacctgggattacaagcgccccccaccacaccctgctaatttttgtatttttagtagagatggggtttcaccatcttggccaaactggttttgaactgctgacctcaagtgatctacccactttggcctccgaaagtgctgggattataggcgtgagccactgggcccagcccctattttcttttcttttttttttttcagtagagacggggtttcactatgttggtcaggctgctcgaactcctgacctcaagtgatccacctgccttggcctcccaaagtgctgggattagtggtgtgagctaccatgcccagctccctttctaaacatacagattttttcttttttttaaaaaaaaaaaaaaaaaaagaggagggatctcactatgttgcctaggctgatctcaaactcctgggctcaagccatccagccatcctcctgcctcagcgtcccaaagtgctgggattacaggctgagtcaccacgcccagcctatatatagaaatatatatatatatatatatatacacacacacatatgtgtgtgtgtgtgtgtgtgtgtgtgtatatatatatataatttaaatatttgtttagagacggggtcttgctgtgctcaccagaagagcctggaccttttgggctcaggctatccacccacctcagcctcccgagtagctggaaccacaggtgcacaccaccacacccagctaatttttaatttttttgtagagatgggggggtctcgccatgttgcccaggctggtcttgaactcctgggctcaagtgatccaccacctcggcctcccaaagtgctgggattacaggtgtgagctaccatgcattcctttgaccaccatttttggagcatcagttacgtggcaggcccagtactggacatggggactctataggagaggcatctgaccctgtgaagctcacgatctaaagagagacagagctaaggaaatggcatcacaaggtttgtccagggccagataaggataaggattctctaaggccctcccactttctccaggtgtgattgtattctggagcctgcagtcacatggaattccttcattcctctccactccttccccacacctaagccagtgcttagactccctaaactcccgactccaagaaccatgggacacattcaatcaaaatcaaaataactgggaatattcaaaaggctgtacatccttcctgggctcttgagctttgaccacgaccttccataactattattgctcagcaagtgctgtcagtgcttcctctgaaatggattccctttctcttgccatcgctctgtgtccaccctggttaccctggtcaatctcccactgggatggctgcaattgcctcctcactgtctgcctgcttctgttcttgccccctgccaatcaatccattctcagtagccagaaggagtgtttaaaaatgttaatttgggccgaggcaggcagatcacctgaggtcgggagtttgagaccagcctgaccaacatggagaaaccacgtctctactaaaaatacaaaattagccgggcgtggtggcacatgcctataatcccagctacttgggagactgaggcaggagaatcgcttgaacctgggaggtggaggttgtggtgagccaagatcaagccattacactccagcctgggcaacaagagcaaaactctgtctcaaaaaaaaaaaaaaaaaaaaaaagttaatttggccaggcgcatggtgcatgcctgcaatcccagcactttgggaggccaagccgggtggatcacctgaggtcaggagtttgagtcccgtctgaccaacatggtgaaacccgtctctattaaatacaaaaaattagccgggcatggtggcgcatgcctgtaatctcagctacttgtgaggctgaggcaggagaatcgcttgaacccgggaggcagaggttgcagtgagccgagatcgcgccattgcactccagcctgtgcaacaagagcaaaactcagtctcaaaacacacacacacacacacacacacacaaaatgttaatttgcatcttgtcacccttctgcctgctcacatgctccagtgctgtcccgtggggcttagaataaactctaaacacctgctagaggttgcagtgagctgagatcatgccactgcactacagcctgggtaacagagtgagaccgggactcaaaacaaaacaaaacaaaacaaaaaacacctcctaggcccacaagggcccatgtgcacaggctcgtctgccccaccgctctctgtcccctgtactcactctattctagtcacacggagtcctccaaacatgtcagctcatgcctctgtccccagagcttcctgtacctgggtccgccttattacttaggtcttggctaagatgacacctcataaaagccttccttgaccaccctatctgtatcaggacttccaacccaatcattctctgacctttccctgggtttccttctccagacgacttgccttgtggtctggcaaacaattatcttgtttggtactaggttccttatgcgtctggtcatggcctcggggaggtaggataggccatgcttgggaatttgggaggctggggaagtgtggagctgcctattcctttcacaggcacagcctcttgaagtcctcaccacattccggaaagatggaaatcctgattcccattttacaggtgaagaagcgtggctgagatgggaaagtttacggtattcttcaagattcctttctacatatgcaaaggtgcacccaaagcttgtgtggccccggttgtcaatggcaaagtagccggattttgaactcagttctgttgcaagtggtcccagccataccacaccgaaccccttaccaattcagagacctgaaccaaggccacaccgccaccatgcagcagagccaggatcctaactcaggcttgtctcacccaaatctagcatgctgtcctggcaccatactctcccccttccccaggcaccatcagggaaatgagggaagggaaatttcctgggttcccaggccacaggccgcagagagataaatacccaaccccagctaaacctggcagtcaggcccaccctgcttcctgttgggtggcccaaggttactcagggtcatagctgaggagccagccagtcactgggatgtccttggctggctctccactctgaagtctcctcctggggtcaggtagccacaggctctgcccttgtggagcaggcccagccaagatagtgaggagagcacaccccacactgtgtgcagcacagttcagcactctgagcctgtgcttcaggggaaagaccccaggcaagtgttttaaatcctctaggccttaacttccccgtttgccaaaggggacacacagtcacattggaagctgctgttaacacttttctttaatctggttaactctctgatctaaattatgggacaaactggagagaaatatggatcgccacccatcttacagctgggaagaaggaagaaaccagagtccttggtcaccacatgtccagacctaactcatccctaagtccagtcaaacctgtctctcagatgcctcagacctatcctcttgctttctccacaatgctgaggttgcactgtcatcatctcttgcctgcatcaccaaacaaactcctcatccacctgtttcccagcttgtccccttcacactgcccacagccagagcaagcttcttaggacaaaaagcaaatctgggccttgcctcgtggctcacgcctgtaatcccagcactctgagaggccgaggtgggcggatcacctgaggtcaggagtttgagaccagcctggcgaacacggtgaaacccggtctgtactacaaatacaaaattagccgggcgtggcggcgcgcacctgtaatcccagctacttaggaggctgaggcaggagaatcgcttgaacccaggaggcggaggttgcagtgagtggaaattgcaccactgcactccagcctgggcaaaaagagcgaaactccgtctcaaaaaaaaaataaataaataaaaaataaagcaaatctgaccaggacactctccatctcaacgcgtgtccgtggcttcctccttacggtcttacaagactctgggagatctggcctttccagccccatctcttgcccctctctccaactgccacagtacagccagatgtagttgcctgaaactttctgcgggcaccacgatctccagccaccaggtctctggcagctccctatgcctggaccctgcgtgactcagggcacgcatcctgtggatggcttggctccctttgttcgagactttctgagtctgcgccccaacccatgtcaggtgcctcttatcccctgttacaactcttacccatagatttgtcgctgcctgtgtccctgtctgcttctccacctggtggtcttgagctgggagcatttgggaagggcaagcccaccaggttctccactaggtcccagcctggcttagtggagactgcccctaaacatttggggactggatgaatgaaccacaatatgccgaggggcctgggaggtacgaggctttcgagtgggttctgcccccagaacagctaactagtcagtgagaccagtcacgctgggcaagaaactaaaggacaacagaaagcttagataacagcttggaatgttacaagctgggtcacaaggctgcgtgatggactgagccagagccacctcctcggcgaagccttccagacgcttctctgctcattgctgaggggcactagagattcagggcgagcaagcgacctgccaggggctctctctgggcgccagctttctgagaaaggagactcgctaccttccgggcctgcttcagggttctacgagctcaagtctggcgggaccctggaaggccgctgcagccacaaactgtttctccttgtcattgtttcttcttttcttctgctcgcgctctccctgccccgccagccctgcgacctcccactgccttcccagggcccctctcccttccctcagccccgccccgccctaggaggcgggcccggccgcgcggtgcaccaatccgagagccccgagccgcctctgcctcccgcgagtcccaccccacgccaccgcccaccaatcgcgctgcgcgcccgcctagccgggccgcgcaatcgcgggagggctgagccgccggcgccccgcccctgccgtgctcggcggcggctaggcgggcggccgcgcggggcccaggcattctccaagcggcgcctcgcagcatcgggctctggctgcagcgtcggggccgcagggggcggcgctgctgctcgaagggtgccgggcgaggcgggcgccaccggccgggccgaagggcgcctcagctccgccggggcccgcggcgcgggtcccaggatcgaggaggaggcggcgcctccgctgcccggggccggcccggtgcctgccctgaggaggcccgaggccggacgttcccggcccgcagcgaccccgacgcgcctcctggagaggcccccgagctcctggcagccccctgggggtgccccaccttccccggcttcacctgcgctggccgcccggcacccaggtgcgggggcgtgagcggcgagggcacctcccccggccgccagcggggcgggggcggggccgccctccgccctcagccttaccggccagccagcccgcccgccgccctcagtctcaccggtccgcccggccgcgcggcgtgagctccccggacatcgcgtctcgggatgctgcaagccagcgcggccgctcgcgcgcagccccgcacctccgcccctgcctctgcctcctgggccatgccctgctgtttacatgccggtgaggtccccggccgctccgaacccctccgagccccggctccccgagggtgaagcccgccggcccgcgaactggactggtggatctctcagacctggggccccggactccgatctccgccgtctccgccaccatcagggcgggatccggctctggtgttttgaggagggggtgtggtgtagggaaaggaatcccgtccctctccaccttttttcgccttcggggcttcagactcagggaactcgctcatggctttcttgatgaagaagaagaaattcaaattccaaactactttcaccctggaggagctgactgcggttcccttcgtgaacggggtcctcttctgcaaggtccggctgctggatggaggggattttgtcagcttgtcgtcaaggtaggagctggggcggtcgcgcctgcagcagcgggggtgatgagcgagacctagacacttggcaagtgtggaagggccccttggggccggtgtgaggaggatccgggggattctgtgtgcctggggcaggttgcacaaggcaggactgggcctgaggcagttggcagggtgccaggcagccgccagccaaatacctgggggtctagtctttcagccttctcttggggccctgcgtgccgcctgcagtaggtccattctgcagacttgcatgtacagcctatcagggatttgtaccctgagcgattgtgcaggggaggggtgttcaggccaccttgcacccgaactggccactggggctgtcatatgattcaagagtctaggccagccacgggttccccggcacccccaggcgcctgggaaggcccgatcgcaggcactccctagtctggctggagggaggtggctggattttggcctacccagccccctccgagtgactatcctcctctggctggagctgggctgctttgcattgcaaatacccttgtcgaggaggctgctgccctctctgaaagaggctccgttgagtttggttttgtgttgttcgtccccatcctggcaggtccagctgcccagcttgttgctgaatgcaactgagttcccaggctgtcccttgccaattgggcccagctggggtcacatcatcctggcctgtctccgaagagccttggacttctacagatgggagtgtgactcttgactctgttactttctgggcctcctcttctggaaagtgagcctaatacaggtggagaagctgcagcagcgagaacttagggcaggctggatgctgtggcttactcctgtaatcccagcactttgggaggcctacgtggaagacttgcttgaggccaggagttcaagaccagcgtggacgacttagattcctgtctctatttttttttcttttttggggggacgcgatttaactctgttgcccaggctggagtgcagtgacacaagcatggctcactgcaacctctacctcccgggttcaatcaattctcatatctcagtctcctgaatagctgggattacaggtgccaaccaccacacccagctaattttttttaaattttaattttgtttattttttagatggagtctcactctgttgcctaggctggaatgcagtggcgtgatcttgggtcactgcaacctccacctcctgggttcaagcgatcctcctgcctcagcgtcctcagtagctgagattacaggcgcacgctaccacgataatttttttgtatttttagtagaaatggggttttaccatgttggcgaggctggtctcgaactcctgactgcaaatgatccaccccgccccccgccccctggccttctagagtgctgggattacaagtgtgagccactgcacccggcctctctctttttaaaaaataaaaatgaaataaaatagtatgcgggcagggcctggccgagtgcctgggacacgctgcttccctacctggtctgccctttgctccctgggcctccttgtgggccctgttagccagagctgcctccctgttctgagagcccatgtgtgcgtgttataggcggagaaactgaggcccagaaagaggaagtcagtggcttgccagggacctcgaaggagtctgttattaactgaacttcgctggtttgggggcctgctggctgaatccagaggtcaaacactctgctgggaggaggggaagggaggggaactgcacagccaggctcagatttaggaatctccggtgtggacagggtggggtgctttttctgagcactggctccctgttctgttgggagctgcttatctgaggaatttggacaagggctgccccttgtggtgggggtggctggcctccttggttgcctgggaagcctgtgatcctgaggccacccacacagcagtctgaggtttcagagagaaggctgtgctcacagctagggcctggagttggctactcactggctgagtgacattgggcaagttacctaagctctctgattgcaagaaccagctaccattggtgctgggctccctgttttactagcacctctcacttaacccctggactgtgtcatggagcaggagtggaggtgggggccccataggattattatccccatgttagagaggtggaaacaggctctgagaggaaatgatttgcctgagttgattcagtggagcctgcattcaacccttttgtgcctctgaacttcagtttccttttctgtaaaatggggatgtcatacccacctctagagtacagataatctgtgtgttatgtctcgcccaggcacactgccgcagcagttatcgcttctgttggtagaggggcccaggctggggcccagccctttccgggtctttggtgggcggtggggtggggaccagatccagtcagcagggggcctgtgtgtgagctgggagtggggacagggtcttggatcccattgaggaatataaattttgagccccaggctgaggacttgcctggcctccaggccctggagccactgtctccctacgtgttggcctttccattgcccaaacctgcttccccattagggaaagtgtgggaagttccaggtcttagtccacagggtctggatttcacctctgttttcccttcttcctcctggcaaggggccttaaattgcctgaatccagctaagcccaaagcatttcccagccctgtcctgcatgcaacctgaatggggctgaggagggaggaactgacactgagctctcgcaaagctgggcagttagtggccaccaggcacctgtttgctgttgggtaggtgtggctggagacagcagacagtgacattggaacctgaggccagtttagagctgctttggtgtttgctgtgtttttgcccagtagacgggggttcctgggttcctgggttcctaccccctccacccgtaccccacccaccctggactgcagcctgggaaccccgcttcacagtctgcccctctagacagcaaaggccccattgtttccaggttggagtagggtctgggggaactggacctggttagatcctggacccagatcaatagcatatttcccccacccccaggaacccccgagatggcccagagacctggtggtggcagcatgggtggtgtcagtgaagcaggcccaaggccccacccctacagcacctgccgtcctggctggagtatttccctgtgtgctgggtgccttggcaacagctgggtacaccgctcgcctgacccaatttgagcaggtagagcaggtggtgcatcaggctgttgctcagcctcatcttcctgaggcctccttgagagcagcgatcctcacgctgctgtgctctgagctcctgcactctgtgccaggcagggtgctgactgttttgcaactggtatttccatgaatcctctcagccatccagagaggcaccaaagccagagaggtgagtgccagaggtcacccaggtggtaaatggcaattcggaaattaacacttttatcgttctataaagcgcccttgattgtacgcattctgtatgctaggggcttgcctagcccctcaaatagatgattatttgaggccctgcagtcacctaccccatgggctgatggcattaccccacttacaggtgaggaagctggggtcaggacaactgaagtgactgggtctgtgctactcagcttgaaattgcagagatgggatttgaatttgggcaggtccagctctaaggccctgtcttgccttgatggcagtgggccggaagcagctgcagacccgtgtgacagccccagacctttgagaaaggctccattccatggattgggtagttcaggaaagtccagagctgagcagttaggaggcaccatggtaggtttcgtgaggtccaaggaaaagtgtccccaggacctttcagggggtggggctgaagtcactgctgtggatttggggccaggcctgggctggcactggggcatggtgagcatttgtattctcccaggcatatgtatccacataggggggcctgggaggctttcccaggggtcccgggagggaggaagaggtcctagccaagtctggtgagtcggggagctgccatcctgtccaaggcagcccttgggcaggaagaatctcaaacacccaagagatctctgcttgcagctggcaccagtcctgtgtctgcctcatgcacgtggctggtggtgccaggggagaggagtacaagggaggcactgacttacctcatagcaagtattttctggaggagatgggcagagagcattttctcagccaacagatggggaaactgaggcctgcggcagagaagtgacttgctacggccacttacaggaggagctgatggcgtagctgagtggacttgggcctggctctgacctctgtcccctgtgtcttagtaactctctgtatgaaggaggcaggctgggccagaacggggagggggtccttctggggtcctcttgtgctctgtacttgggtgccagactgtccaagaaacagacagcctgtgacttggaggcccctcttctggcctttcttctttggtaggcttgaatcctcagtgggcttttgatttgggcagtctttggtgggcgcgtggccgcccaccacaaagatgctgcctgccttccatggcacggctgggatggtggccccggaggcacaggtggggttcttttagtatgaagaaggccttggccaggtcagtgccgcgctgggggccccacgccaggcccagtccctggggaggccagcctggccgggtctttcctcacactccacacacttgtggccagagcctccacccccctggtccctcacccgcccttctaggaaaaggctgtggaatgctggttgaatccacctccgggggaggcctgctcacaggcacagtgtggagctccaggagggcaggatggagatggacacagaattctgtcccttggggctgagtggagcaggggccgtggaggttcgatgggattcttagattggcagggcacccactttccttcacagagcaggagctctggaggctgagcacactggagagggagaggaggctggtgggcacgtgtgcctgttccactttccctgaacacacgctttgtcttgggcttctggaggtgatcatgattagacagccctgtttccatggagctgccagctaggtgggggcagtgagcttggtgggcatcgtgaaagcttcagagcaaggcagatctagggcatatccttctgcatcccactggatcccggcaggcagctggggaggcatttccgtccaggtgtctgtccatttatttgacagatgtggatcgagcacttaactcaggctgggcatggtccttgtcctcatgtggcacatcactgagttagggagagcttcctggaagaagtgacccttcctgggagccttgaaggcagaggggaattggacaggaaagagatcgggataagcctttggcatagaagcccctggccaacaggcacttgttcccagggtcaggcgaggagctggggtatggggagggtggaggaggggatggagtaagttagggtaatgggtggccgagctggtgtgttcctggcctcaggagtacctacccaggggcagtggagccacgtggcctggttgccaggtggagaaggttcaggggcctgacctgcacccagggaaggacaatgggagttggctggcaggtactgctggcctggcggtagcaggcagaggagcaggcagattggagagagggctggcaggcagagtgggcaagtgggcttcctcaaccgcagggctggcatcatgcctagtacttagtaagtgccgggagatggatgggggcacagtggccaaatgtagccagggtttgtcgacccctgcagtgcgccagtcatttgtgattgcatgaaaatcagatttcccatttgttttaagttggaagatctggcagcagtgctgtgtggcggcgtttggctcaaggggctttacagctgcctcttgacgtgggctgcccacttgagttcccctgaccccgcagcatgccttggatgtctgatgtgtgctgccttaggccagcctggtcccctgggtgccgtagaaggccttccaggtgcaggtcgggggcacaaggaggcagagtggcctgtggagagaagccctgctggcagaagtgggcagggctgggtggcctcagaggccagcccgggcagcgaggctgtggtaccaggccatctgctggttccgcgaggtcagactatactgctggtggctgcggggaagcctgaagctgccgtgactgtgcctggccttggtgtctgctccttggacctagcctttgctgccagctggctgcactgttggcaggtgccaccctggcagcccctgctgcctacctgccagcctggcagcagccctgacccgagatgatctggcttcgtggagccaggctatttcctgaggcctgttccttgcttcaagctccgtcctgggagctgctctggccagaggctcttagcagcaaccacattatgtgcctgagggccctgcttgtccaggggtggcaggggggccctgagtccctttgaaccctgcttgttcagtacctgggagtcctgacttgcatttgggaggccctacttgcaccttgggatggctgctggcatgtctgctaaggggtcaggagccgactgactctgtgtctggcatctggtgactgctatgcagtgaccctgcagtcactcgcttgctgctggggacaggcagtaatatcttaagcacaaccagtttagatgtatcctcatcttaccagggagccccaggaaggtttaagcaggggagagacaccagatttgcttagaaagagacccagaactaatgtagggtggggagggggtgttgctctgtattatccacctccctggcaagtgctttggattatggggactccagatatgccctgggacctgtcagccacccactatgaggtcagactgctgtccgtggctcagtaaggcccaaagctgccaacctatggctggcttctgtgtctgcatagggctgtggtggcaaaccctgggtctttgccctgagcctcttttggcacccagggcttggaagagctctcacatgcaggcctgaagctgcccgcacccccaccctgcccggtcctctgtcctgccagccagctgatttgggtggctgggaggaagagctctgacagaggcctttctgcctgcttgttctgccttgttgcctccctgcctccaggcctgcaggagacatttccatcctgcttctgctacttgctgcctgtgtgaccttgggcaagggacttggcctccaagcctcagtgaccgcccctgtgaagcagggctgccggtgcctgcctcctggtgctctcagaggacatggtgagataatgtctgtcagacgcccagcgcggctcctggcatacagtgcacacgctgcatgtgcttacagtctgtcctcctgtgtccaggcagagttatggcagggtcagtgcccctgcatggccgctggcactcctgtgtgggccaggactgatgaggtgctgctgggagaggacactttgcactcggggcagggtgggggtgagtgaggagcacaccgggtgtctgagctcagggtccccagtggggtctgcgtgttttcttgtcccttgttggcttgaacttgccccacagggagatgcttggctgtgagccagggtgagttggagcgtccctgcttggtggacccaggctgggctgaggggcttttggtgagggaagaggccctctgcacagccggctctgggacctgctctggcaggcagaagacagcctccacggaggcagagggcactggctgtcaggctgctggtgggctggagtgtgggtgagagagacagcggccgctcagtacatgggaggccccgccactcccggcatcaggctggcctcgtcggcttccactgctcctcgcccttctggtttctgtgcctttgttccctgtagttgcctcttcctcaagttcccttcccccacttctctgctcgctgaatttcttctcagcctaagagtcacctcctccaggaagcctccctggcctcttttggccttgtacactctgtgggccctcatctcaaggcactgcagtctctgtccacatctctagctcattccgcagactgtgggcccttcgtgggcaggagtagtccttgcatcattgcatcttggtcttggggcttcctgctgtgggttggcactgtcctggtgccggggcttttctcccctggctctgaaccagtgtgagtgctggtgtgggacctcactgtggctgctgccagctgctggacccgcccccccgccccgcattccctcttcaggcccgaggtgtcagtctgtgtcaggagcagccctcacttgcatatgggacagctgggtgcctccacgggctcagaggctgcaattgagaggcagctggggacatcaatggtttgggtggggtgggctcctctgcatggggcagggatgctcatagcaagcagaatggaaaggaggagggggctggggcctgactccaagcacggcaattggaccttggcagttgcttgatttccctgtgactgtggctaaaggccttgtcctctcagcctcagcttcctcctccatcaaacagggctgctcaggagggctccctacccagcacagggccaggcacctggcaactaaaaacagactaaccctgcccagagaggaggtggccggctggtgctcagggagggcggaagtctgggtgctaaacactcttacctctcaccacttcctctctgagcagactctgcaggtgtggggcagcatacctgtggctccctgctccccctaggctccccccagacaaattcttgggctccttctggtgtggggctcaggctgggccctggagatgtggcccccacccctgcagggccctccagtgaggggaggtgcgcaaatccaatcagtgctatggccacaggccctaaggaggtgatgctgggctcggttctggggcatgagtaggattagcaggtggcgggtgggagaagagcagcctgcggcagaggcacggcaagggcagaggcacggcaagggcgagcgtgctgagcgggaaagaggggctggctggcctgggagggagcttgaagtcaggaggagtcaaggggaggggtttggactgtacctggaggggtgggagccacagaaggtgtgaatccgagtcacatttgtagtttagaaccaccaagggcagccatggggttgattgcttgggactgcaggttgcagaagggcaggtgactgtcagctgagaagggcaggtttcaacctctgtcatcagggaattactcaaaacaaaacccgaggcatactgtgcagtgctgaggatgaacaagctgctgccactcacagcaggaagcagtctgacaaacaacgttgagcaaagaaagccggagacaaaagagtgtatgatgcggccaggtgcagtggctcactcctgtaatcccagcactttgggaggccgaggcaggaggatcatttgaggtcaagagttcaagaccagcctgaccaacaaggtgaaaccccgtctctactaaaaatacaaaaaaattagccgggcatggtggcgcatgcctgtaatcccagctactcaggaggctgaggaggcaggagaatcacttgaactcgggaggcagaggctgcagcgtgcggagatcgcgccactgcactccagcgtaggcgacagcgcaagattctgtctcaaaaaaaaaaaagtgtatgatgccatttatacagagttcaaaaacctttctgatgcaagtcagggcagtgctgtctttgctgaggggagtcatgtctggaaggaccttctgggggcctgtaatattctgctgcttgggggctggtttcatgggtatgttctctctgagaatctgtgagttctgcacgtctctgtgccagaaacaagactcgagatgccccacacttttggttggtgctgggtggatgcctgagtcctctagacaaaaatgaggcacctttttgggtgcccggaagcctggaggagatccctgggtgttttccttggtctttctggtaaggcagcctgaaccgttctgacctgataagcatcagtcttgtttatgaggcagtaactcatcctggcagctgcaaacagagatgtaactcttctctggctggagattttccttctgcctcttgcaaactccagcagggcctgctgggctgtggggcttggctgttcatggggagggcaggctcctgaggctgccagagaactagatctccccgagctttgctttcctcatctgtgaaatgggataatgaggtcctccttgatgcttgggtgaaatgggttaatgcctattatgtgcccatcgtagtctctggcatggagtacgggctcagtaaaggctggcagcattggtattcatccagggcagttattgtaagggccctaggggtgagagcagaaaggaaaggtccatattcctccctctgtccctgtaattgtttctcttctctcttcctgtggttcacctatccagcaaacatttgtgattagaaccaggccattgccttggccaagacaaccgtccctgcctgggcccagagccaggagagactgttaggcacattcgtctctcagaggagtgctgagcacagtggggtgggggagaattgccactccgcctgctctgccctgaaccctgtctttgccgacgggcatttgactgtgctctccccaaatcccaggagaaggcctgaccttggggtgtagcagcccctaagggttttttatgttggccacacccatcttggatacaggcaagaccaaggccaggctcttgggatgtgtcccccgtgtctagcacaggcctgacgtgtagtaagtgctcagtacatatgtgtggagtccgtgaatgacagaggcaaagattggtccaggattggtctgtgagtcttcagggaatcacatgtctggggaggaggtggagaccagtgagtcagggcctcacactccagcctgatgcttagcccatggtggttggaatcttggggaactgatgaagacagctaggaaaacaggtctgagtctgtgcagggctgggaggaaaagtgactttggcggagcgattcacaattatctcctggtcacctcagaagtccagggaaccttagggcatactgtatggatcagtaggaacagctgggtggcagagccagcaatggcagtgacccctggccccttacactctgcagagaatatggccctacccttccatgaaggtggcacaagaaggcttaggggagcccttacgggagcaggggtatgaagggcgctcatttagtcattagttagttactgacctaccgtgtgcccagcaccatccttgcgacaggggaagcagcagtgagcaaaacagaggcccttcctccaggacctccacactctgggagacaggaacctaagacccaggcctagaagaggaaacttgcagtgtgtagggggtgcccttgggatgggctgggatggagggtaaggatagagaggacagaggcagccccatgacttgagtctagtcattcgaggggccaggccctggggatgggaatccgttcctcctctctctccccttcctccttgggtgaatcaaccaccacccaggcatgagtcagccaggagtggctcaggcatgcctaggccacctgctggtccccctccctggatgtcccaaccagggtgtcccagccaggtttaagatctaaggaagccaggcgtggtggctcacacctgtaatcccagctacttaggaggctgaggcaggaggatcatttgagcccaggaaacatagtgagaccccttacctcaaaaaaaaaaaaaaaaaaaaagacctggggaaatatcctgatctatggtcctggggtggagaagaaggtaggggactgtgtgaccagcttttcctgctggaccatctgcctcagaggggaactccaggtgcctgtcagtagttacttctggaggtctagtccctgcccccattcagcatgggtgtccactgtgccaggtcctgtagcaactctgtgagacagggacagaactgcgactgaggcccagaaaagtcaagtgtccggtgggtaccagagcctggctttgagccccagtctctgcttcccaatgccttgtgggcaggcctgctgggagactggtgggtgcaggaagggaagtcccccgagcagagccagccccgaagctctgtgtttgctgtgggcatggatcctggggaggggaagctgctaccacagcccagtgtgacacccattgtgtcttcttgctttgaactgctggggtcttgggcccaaccctggcatgggagcccagcttgcagctctggggtcagacagccctggctttaggtcacagccctctcccggccagtagaccttgggcaggtgacttccctgctctggggcctcaatttccttggctgcgatggggtaatgggctgacagcacccatctcctagggctgggtgtggattcttggggtcagggagagtgcttggctcggtgcctgacatgcagcaagtgttcaggagatggagggctcatctttggaagttctgcagagcttgcctgctggggggccttttcccacttctccctcctaacttgggacttcctaacatggtccccaacaccagcaggtcttgacggatttggctcagagccacaccccattggccccacactttgacccagtgaccatccctcccttggcataaacctggtctcaaagcctcttccctgggattgagactcaaggtgaagggtcagcccacacagcatggggtccagggtcgctagcgtgacagatgcccatgccacaatctctggagaatggctgtactgccttggcagatttcccaggggttctgcaagatcaggaagtgggggtgggttcctgaaggggggcctgggagtacagaccaccccttacctcccatgtgacctgcagcgactgcctggactccccaagtgtctgtttcctgatctgtgaagtagaagcaggaagatgatgcttgagaattacttggcacacaggagggtgcctgggaaacagccaggctgggccatgctgggtgccaggggcatctttgcccaggtgcatgagattcttggttaaagccagtagtttactttgggtcccttcaatggcctgctcgcctcttgggctgtaagagcaagagagagtgatcatttgcatctggagaatggcgttaacagggcgtttgcctgggcagtagctcaaggcatctgcacaacctgactctgggtacagaggacagagcagggcagccacttgcctgtgcttgtaaaatagggatgcccacacctgcctgcatgggcttttttttttttttttcggagatggggttttgctatgttgcccaggctggtcttgaactcccgggctcaagcagtcctccagtcccagtctcttgagtagctgagattacaggtacgcaccaccatgcccagcttgtgtggggtttcccttgaagatcagtctcaaggttgctgcttgaccggtgagcagcaggattcagacctagatgtgtctgactctgggatcctttcacctaaccctgacgctttcccagcaagcctggatgacctggcttccctccaccctgtgcccatgccctgccccttttccatcttggagtttctgaagccccagtgggctgtccactctgtgcttctttgggtcacttatgatgccagcctccctcccggcccacccgccaatcccaggccactgctaataggggtgtctttggcaggggaacaaagagcgttttggggctgccaggtggctgctctgagtgctccagtgttggccagagtggcttggcttccagaaacttcttgctgcctccttgcaggaggaggtcctggccatgctaggactgtgagctgctccccctgaacccctggcaggagccagacgctgctgtgctgccacgctggctcttcagcccctggacggacgccttggctggtccccagggcaggctcctcccaggcggctgtattctcttctcttcggggaagcacaaggcagatgttgtcgatttaaattgtttccttattagactctcgctctctggcctgggctgggtttcatcagccgggaactctgattgcatcactttgccgctcactcctccaggaaccaggccaagggctgggagagcaggcagggtgggagtgagcgtggctgagggaggggcagacggatggcaggcaagggacttaagtgatggacttaagtgatggggccctgttctgggggaccagcactgtcaggaacccaggagcacagctggaacctggagttccacacgcctgtcagagcgctactgtctcttagctgggtgcccagctccctgcatcagaatcacctgagagctcgtttaaaatgcccttttaagacctgcagcagtgactctcaaccagggttgatttggcgatctctggagacattttcggttgtcacacctggggctgtgctactggcagggtgctgctgaacatcccacagtgcgcaggacagcccctcacaaaaagaaaccctgtcctgcggagtctgtggttctggaagggctcactgggaatcttcgtttgtcatgagccagtggaatgttttttggtttttggtttttttttttttttttttttttgagacagtcttgctctgtcacccaggctggagtgcgatggcgcgatcttggctcactgcaacctccgcctcccgggttcaagagattctcctgcctcagcctcacaagtagctgggattacaggtgcccgccaccacatctggctaatttttgtatttttagtagaggtggggtttcatgtttcaccgtgttgtccaggctggtcccgaactcctgacctcaggtgatccacccgcctcagcctcccaaagtgctgggattacaggtgtgagccaccgcgcctggctgccagggatatttttatctgagaacccctgtcctgctggacctcacccctctctttgcttgtgagtttgagcacctgcccccgcagggcttcgtgctgggcacccagtggaggtgagatgtgtgtctctgagtactggaactgggaaggcgaagtgttgagagtggacgtgggtcaggctggagccctgtcacagaggttggactgccccagtgatacccggattcctttttcctgactttctgctcctgtgagggttgccagccaggcatgcacttttgctccaactctgaggagagcccctgatgggcccatttgacccctgtctgtaggaatcctgtgagcctggcagcttgaggccaggaggtggctcccacagccctacggcacctggccccacgtcaccctggtgatggagacctggggttgtcaaggctctgggatcttcttgttgcacctactgggcagtaatgctggatcaggctggggccaggtgctggggatgtggcagcgaactgacctcgggaccacagaggcagaattctctgcatcctccctctgttgagcagtggagagaggtgctgtgggaccacagagtcaccccaacagccccatgtgatgggtaagtcgtccttttacagatgaggaagttgaggctcaccaagatggggctccccgagtcacttggtggcctctcctcgtcaccagcctcatccaccccccggctttccagggaggctcttcctgggagccacctccctccttctgggtcttccctgtgctgttcccactgcctgggacctccttccccccaggtcttcacccagctgactgcctgaggtcccggctctgatgtcactatccagggaggcttctcggcctcctgcccccagcctgctctgttcaccgcccttgtagctccttctccttcctgggagactggcggtgactgcagtcattcctgtgtaatggccgtctccccctctcaaccagggactcctccaggaggttgctcgcattgtgtcccgcaccccgagccggcaccacagtcagtcctcgtggatgcattgtggaggtcccggtccgatttgggatacaggtctgtgtgtctccccacaccacctggcgtgcttcctgggatgggtcagagggtggtcaggtcactgggcagccttcccagggctgggagagctcctggagagttctgctgggccaaggacaccagcctggtggggtgttctgctgtttccagacagcccagaaatagccaaattccactgctgggatggccacagtggctgtggtgggtgcagggcttgtcccgccttgctgagatttacatgtctaattgtatatcttaaagctaaaaatgaaacccagtctctgtaattacctgttcctggcagcggggagcgggggaagcacgccctgcaaccccaggcccgggagggccgttcatcactgtctcttcccaggcgggcggccagccctgccagcaggtcccatgtactgcatggggtgactccacttggtaacttgggaggacccaggccttgaaccaggtggctgagggttcagatcccttttgcttataagcagccttcctaacccatacccttttctcattttcaatttaaatttcaattatggaaacaactcttggacagaaacgaagaaagagtctctgataacccttccaccccacctttggtcagacctgctctgagctccctgcctgccttctggccattatcccttcataccagtgtgaataagctgcttggccagggagcctgaagtccaggattctgggttaaaacaatctccttctccggaccttgcttctatcattttaaaatttcagttctgtagcccagacctgggccacattagggtaagtaggtggtggtgggcagtaaggagggtccgtggtcctatttcttttttcttttttaatcaaggtggggtcttgttatgttgcccaggctggtctccaacccctgtcctcaagtgagtctcctgtcttagcctcccagagtgctgggattacaggcatgagtcaccatgcctggcctgttttcttaataaacatcttatttataatttttcttcataggtgctcattttagtttttttacactttcctctttctgagacaggcagctggttgtgcctctggtcactggagacatgtgttgggtactggcatgcacagcacccagcagcccaggcctgccctcttagcactcacaggccatggaggtcacagccagccctggtggcactcagctctgaggaccctgggccctccctccagggtctcatagtgctggggtggggtcgttctgcagagttgcatttccaccctgggccacaatgcagtccccaggactgccggggattgggtttcctttggtcaggtgtgctttaagaaatgctcacaatggatactttctgttcaagacaaaggaaaaaaggggcaccatgcccatcttcatcctttcttttcttccctactcaccccaatctccagacactccagtggccagaggtggccttcatttgcaatttgatgtgggcatctcctgttttctgtgtgcttgtgggcatttacatatgtcactttaaaaaattaaataaaaatggggtcatgtagatccccttctgcatgttcccttcctgcaggtctgatggggccatcccaccctgctggggagcacagcttgccctccctcccctccttctcttctggcgttgcctgctgggtgccatcggagcagtcctcattacttcccacttttgcccaacttctgctgctgtgaccagtcgcatacacgtggacaccgtggggactgcccctccatacagctcctctgtaagcttaggaccaaggctgcctctccagtctccctggcccatgcctgccccggcatcctccgccccagctacactggcccccagctcctcctcaaacgcgacagacattcccaccccggggcctttgcacttgctgttcctcgtgcccggattgctcttcccccagatatctgtggccactcgcttcagtctttgcttagatgtcaccttcccatgaagaccttctctggccctcattctctggtgcccccattgttggggcactgtctgcctccttccttggttcctttttctctgttgcaccccaggctagctggtatgcatttgcctggttttgtctgtcttccacccactgccagagtataagccccttgaaggcagggatttctgtcttctctgtttattgcttgtgttcccagagccttcagcagtgcctggcacctggtgggggcttcataaaaggtttctgaatggatcaaggctctgagatgtcctcagtcctgacctggccagctcccaacctggggctcatggctgcctgcctggcatcctcattcccacctcccatcacaagcatcccttaccccaccctgcctgagcctgtgttcatctcccaccatgatccctgccccatgcatgggacttcatgccacctgcctgggggtgcccagctgcttcccaccagaggggccccggggctgagggggaggcagtgtgggccctgaggcagctgcatagctgtgtcccagctgtgacacagggtctggacgcagatggggctggggtcgagactagctctgctgtgacttcagatgagttacgcagcatttctgagcctcactttccccatctgtaaagtgggctgtggtagcagtcacctttcagtgttgaagagttctgggccgcacacagtaggccctcaggaggtggccgctgctgctgtgtttttttttacccttgctgtgacctctggccgtgggccagggcgaggctgcttgcctcttcccgtgggagtggtggcttccaataggtgattgttcagagccctgtagaaacaggagggaggcccagtgctgaccctgtgagctcttcctgtggaggggggaatgtgcctgttacctgagctaggagggttccaggtggctttttctggcttggccctggaactgcaaatgggccttaggcttcctggctggcgttcccacagcaaactctcaaaaggaaagggagaaagcccacaattcactgtgagcttttgttcccagacactaatcccaattccactgggtgtttcaacatgcccagagcaccgagctgcctccccaggcctccagcagctgcttccaaccctaggtgaagtgtggggagccatggccactccccagccttccccctttcaagcttgggcctcctctggctgcctgggaagtgtctctgctctctttgcccttccattctcctcctctgtggctgttctcagcctctgcctaagccacagtccacgggggcaagacagagccgctgtcagaatcagatgcagtcttctcacacccttgaggtctagcaggacctgcccctgctccttcacccatctcatcccctctgatctccccccagctcctcttcagccactgtcctctgcactagttttctacctgccaagtgtgtttctgcctcagggcctctgcacttgctgctccctcacctggagggctcttcccctgtctttgctcagtccccacttcagtccaagccgtgctcagatgtcactgccctaagggccatccctaaccccccacctgaagcagccacacctcatcgctacctgcactccccacacaccttccctgtggtgttctccatttttctatttatctgacctaccatgtatttaacagctttattgagatataattcacataccacacaatacacccatttaaagtgtacagttaagtggtttttagtatattcacagttgcacaaccatcatcacaacaaattttagaacattttcatcaccccagaaagaaatcccaaacccattagcagttactccttttcccctcaagtcccctgtattagtctgttctcacactgccataaagaaataccgaagactgggtaatttacaaaggaaagaagtttaattgactcacagtcccatatgggtgccgaggcctcaggaaacttaaaatcatggcagaaggcgaaggggaagcgaggaccttcttcacatggcagcaggagacagaagcagcagcaaaggggaaagagccccttataaaaccatcagatctcatgagaactcactcactcatgttaacagcatcggggaaaccacccccatgatccaatcacctccccccaggcccttcccttgacatgtggggatcacaatttgagatgagatttgggtgaggacacagagccagaccgtatcatcctccatccctggcagccaccaatctagttcctgtcactatggatttgcctattctggacatttcatataaatgagataatcaactctatagttctttctggctggctgctttgatttagcttcatgttttcaaggttattccccagttagaagtgtatcatttctctttattgctgaatgatacaccattgtatgcatagaacacattttatttgtccatttaccagttgatggacatttgggttgctttcactttttggttatgaataattctgtgatgtacatttgtgtacaagtttttgtgtggacacatttcatttctctgggatatatacctaggggtgaaattgctgggtcatatcataactctgtgtttcaccttttggggaattgccatactgttttccaaaggggctgcaccattttacattcctaccagcagtgtatgagggttccactttctccacatcttcgcctttgattctagccatcctagtgggtgtgaagtagtatctcattttagttttgattttcatttccctaatagctaatgatgttgagcatcttcctgtgtgcttgttgaccacttgtgtatgttctttggagaaatgtctatttggatcctttgcccatttttaattggatttttgtctttttattgagttgtgggtgctctttatatattctggataccagtccctcatatatctgatttgcaagtattttttcttattttgtggtttgtcttttcacttttttgatgatgtcctttggagtgcaaaaggttttttgtttgtttgttttgttttttcttttttttttaagatagggtttcactgtgtcacccaggctggggtgcagtggtgtaatcacagctcactgtaacctcaaactcctaggctcaggtcatcctcttgcctcagcctcccaagtagctgggactacaggcatgcaccaccactcctggctaattttaaaattttctgtagagatggggtcttgttgtgttgcccaggttggtctcaaacttctggcctcaagtgatcctcccaccttggcctccgaaagtgctgggattacaggtgtgagccactgtgccccactaaaagtttttaattttgatgacattcaatatatctatatttttcttttatcacatgtacttctggtattatatccaggaaatagttgcctaatccaaggtcatgaagatttacccatatgcttttttccaacattttatagtttagctcttacacttagatctttgatccattttcagttaatttttgtatatagcatgagatagccctgtgcaccacccccctcacacacgcacttcattctcctgcatgttgatatccagtgtcccagaaacatttgttgaaaagactattctttttcccactgaattattttggcactgttgtcaaaaatcaattgaccataaaagtgaaggttggtttcttttttctgaaacagtctccctctgtcgcccaggctggagttgcagtagtgccgtcttggctcactgcaacctccgcctcctgggttcaagtgagtcttgtgcctcagcctcccaagtagctgggatcacaggcacatgccatcatgcctagctaatttttgtatttttagtagagatggggttttgccatgttggccaggctggtctctaaggtttatttctaaacctttgtaaactggataatctcagttgtattccatttgtgtctgtcctaatgctaggaccaccttttcttgattattataactttgtagatattttgaaatcaaaagcgtgaatttttaaatgatgttttactttttaaagattatgttgactattctggtcccttggatttccatgtaaagtttaggatcagcttgtcaaagttctgccaagaagccagcgtggggctttgatagggattgtgatgaattttagaactatttgggagtatcatcttaacaacatgtcttccgatccatgaacatgggatgtctttccatttatttagatatttaatgtctttcagcaatgttttgtagtttccggagtatgtattttgtactttattaaatttattcctatgtatttttttctttttgatgctattgtacgtggaattgctttcttcttttcactgtgtttgccaatatatagaaagaattgatttttgtatattgatcttgtatcctgcaacttttctgaactcatgcatttttattttttatttttgttctttgtttgttttgagacaaggtctcactctgttgcccaggctggagtacagtggtttgatcttggctcactgcaacttctgcctcctgggttgaagagattctcccatctaaacctcctgagtagctggaactatagctacctgacctcaagtgatccatgcccgcctcggcctcccaaagtgctaggattacatacatgagccaccacacctgtaatcatgtatgaggccaggcattgtggcccatgcctgtaatccagcactttgggatgccatggcagatggatcacttgaggccaggagttcgagaccagcctggccaaaatggcaaaacctcatctttactaaaaacacaaaaattagccaggtgttgtggtacatgcctgtaatcccagctacttaggagtctgaggcacgagaatcacttgaacccagcaggtggaggttgcagtgagccgagatcgtgccactgcactccagcctgggccatagagtgagactctgtctcaaataataataataataataatggccgggtgtggtggctcacgcctgtaatcccagcactttgggaggccaaggggggcagatcacctgaggtcaggagttcaagaccagcccggccaacacagtgaaaccccgtctctaccaaaaatagaaaaattagtcgagcttggtggtgggcacctgtaatcccagctactcaggaggctgaggcaggagaattgcttgaacccgggaggcagaggttgcagtgagctgagtttatgcccttgcactccagcctgggcaacgagagcgaaactccatctcaaaaaaataaataaataaaacaaaatagttttttagtggattccttaagtgttttctgtataaaagatcaagtcatctgttaatatagttttagttcttcctttccactactaggtatttttcttatttatttggtcttcttctttctcctcccaccagaatgtaagctggttactgctgtggttcgagtgcctagaacagggcctggcacacactggtgctcagttgtttgatgatgaatgaatgaataagtggagccagcatgactaggctcaagtgatgcccccagcctagggcccccactcctgtggcacctgcctatagggattagatctgtcccttcctcccgtcttcagccctgacctttctgcttgtccccagtcttggttgcagagggttgttggagctcaccctcctaacaagctaggtgcattctggtgacatcacagagccttcaccgggccaggcactttgcaggattcatttcactcagtgctcccacaacagcagccacgacaggggcggtgtgccccagtgagtgtgcagggtgtggcccaggtctgcctgccctcttgacccttgtcactgccttggcaggagcacagggtaagccttggtcacatcctcaaagccttgtggagcctggagggggctcctcatagaaagtgaggcttaggggctttcattggctaaggaaacgggactccctcattcatgctgtttcctctccttggaactgtctcctccacctggctactccccaggctcattctatcctgagcttgaatgtcaccttccctgattcatctgttcccccgccctctcctggtgacaatgagtcatcactgggtaaatacagtctgcagtggctcatcccagcacctgcttggcactcagagacctgggcggtgccttggggcagagcagggtactacaggccccacaacaccacaggttctcctcgccaggctttcccgggctcctgagccaaagtggcgactgagagccctgactctgaagtcatacagtcctgggtttaaatcctgctttgccaatcactggggatatgagctcgagtggcgggtagggtggccttcttttggagcttcagtgccctcagcagtagaaggggtggcatagagcccaccttgcaagactgccatgcaaagcaaacctggcgatgctcaggggaggcttggctgcggccctctccgaccctctgccctgaggcctcgatctggcagttaacccactctcctcgggtcacttccttagctgtccccttggcggttgtgcttaggtgggatgagctggagataacgtctctcacactgtctcctcccttccctggccaccccttcctgagcacgggctctgccaggcaggctgtatggagatggggagctgctcggggatgcagagctcggttctgccacgtgccgctgccacccccagatcctgccaaggcccccgcagcagttgggaggggcttggatgagctgctgccactggctcccactcactcccagggcacaaagcatctctccagtagaggggtgctgaatttttcagcatggtcatgctctccaactcaggaggaaccggggggctagaagaccagagccctctgcttagtgttggtgaagctgaagcccccaggtcgctgtctccgcacccagagtccaactgcttgggttaatccccattctgctcttacctgtggtgggcctcaggtgagggtcttagcctccgggcccccagtttctttgactggggattgagctgatgatgtggctgctccatacagaggttggaaaggtttggcatgaccacctttctctggcacttggagcaggctccagggcctgctggctcttgtgaagttctttgaacagtgcctggcacatgggaatcactgtgtgggtatcagctgttgttactattgccattgttgttattagtgatgaagaaggcagctctggagtcaggaggaaccaggcttcaggcccagctcagctatctactggctgggaggtgtggggcagcttgcctagcctcggtctcttcatctttgaaatgggctgagtagtccagcctaagactattgtgagggtcatgaggcggttggcagagcctggctttggaggaggtaatggcagtgcagggaactgcccaaggtctcagagcaaggtggcgggagcagcactgggtacagagggaggctctgcaggttgccaggcttcctggggagggacagctgccctagctcacctcacccctgccttgtgtttgtctcatttttattacgttttcactgttgtttttacaacaactacacgagtacattcttgtggtgaaaacacagctattttgtgacacagagtgaaagtggagcttcccaccgcctcagtcccaatggggagtgccatgtccctggtaccacatggagtcccctggcgcggatgtgtgtgcctgtgctcacctgtcgcctctggcccacagggaggaggtacaggagaactgtgtgcggtggcgaaagaggttcaccttcgtgtgtaagatgagtgctaacccggccaccggcctgctggacccctgtgtcttccgtgtgtctgtgcgcaaggtgaggccaagggcgcatgtggggctgctgggctgggctataggcccctcccctcatgagtccgcacccccagctgaaaatggggtgagttgctctgcccgttgccctcctcccctcagatctggggggattgtgggagatgcatgaggtccctgggattccgcagtcaacttgctgcttgtgtctccctccctgtgcaggagctgaaaggcgggaaggcttattccaaggtaagaggggctgtgtgaaggggcagtgggatggaatggggggtggcatgggacaggcacaagggaagcctccagccccttttctgccacaagcaagaggcactcagccctacctgagatgtgttattttttagaaatatctttattgatggtctttgcactcaatataaaggcagcatatggttgttgcaatataaatggtacagaagtccacagagcaaaagggccagtttctgtcccctttcctctctccaggcctctttctgggaccccattattggatagattaagacctttccagaccttgtaagaagaaaaaaaggaaatataccatacaaagagagcagcaaataaaatgtatgcgtgtggtttaaagaaatgcaaaatgagcaccctctgtgtgtactgaagtgcatgcaaacaatatgattttttttttcctctggagacagagtcttgctctgttgcccaggctggagtgcaatggcacaatcttcgctcactgcaaccttctcctcctaggttcaaacaattctcctccctcagcctcccgagtacggctgggcatggtggctcacgcctataatcctggcactttgggagactgaggcaagcgaattgcctgagctcaggagttcaagaccagctttggcaatacgacaaaaccccgtctctactacagatacaaaaaaaattaaccaggtgtggtggtgcatgcctgtaatcccagctactcgggaggctggggcacaagaattgcttgcacccgggagggtggaggttacagagagccgagattgcgccactgcactccagcctgggtgacagagcgagactctgcctccagataaataaataaataaacagatttgcagcttggttttttacttaatccattctgggcatctttttgtgttatcacagatttccacgtgctttctaatggcagcagtgtcccgtggcatggctggcgatggttgactcagccagccctgctgctggacatgtgcattgttaccagggtttcactgtacccacagacagttcagccctacatagtattaagagcttttctactgggcaaagagggagaagacagctctggctttgaataagcctgctctgccttccatccctcttctccatggtggactcttggcctcccctcctcagctcctgaggcttagcccagtggcaggagggtgggcttcatcagccgggaggggaaatgcctttgcctcacctctcacccgagggaggtgctatacagggcgtggcccttcccactgaccagagctcaggaactcagccggctgggcagtgcactctgccctggcccggggcgctgacgtccctctccagaagcagaggacagtatggctagaaccaggctgtggagggtgctgtcacagtggaaatttctctgattcacacgggtgaggacagctgtgcagccaggaaaggaattaccagcaaacacctgggagcatctcacctccactggcaaacatttaccaggcacccagcacgtggcaggcactgccaggccccttcccttctgttctgtaattgaactcccactgcaggctttactcccattatacagaggaggaaactgaggccctgagaagtggctggacgtggtgctgatcaggcctagtttcagtcctgtctctgttgggttagctgtttggccctgggcaagcttcttcccctccctgaacttagttttcttttcttttcttttttttttttttttttgagatggagtctcgctgtcgcccaggctggagtgcagtggcgcgatctcggctcactacaagctccgcctcccgggttcacgccattctcctgcctcagcctcctgagtagctgggactacaggtgcccgccacctcgcccggctaattttttttgtatttttagtagagacggggtttcaccgtgttcgccaggatggtctcgatctcctgacctcgtgatccgcctgccttggcctcccaaagtgctgggattacaggcgtgccaccgcgcccggcctctgtgaacttagttttctcatctataaaatggggatcactctgagtccatggcggggctaggatctgaatccaattccctgattctggagtgtgtgccctgaaccctgcagtagagacttgcaggcagcagttacttgacactcatccctgattggttcggttgggttcaaacattggttcaaacatttcattatctgtctcttctgagcctgttgtatctggagcagagctgggcaggaggtggtaagcagaggctctggggcctcctagaccctttgcagagggaaccggagatgtcttccaagtccccaagtctggcaccacctcgtctcaatctcactttcccctccaggtctagcagacttggcctccatccacagggccttcttagcgcatgccctcttcgcacttactcccacttccctccccatccctcgatcctctgtccagaggtcccaagggcctgttcagaccctgaactctgcccagcagcccctcactctggcctctaccagggcgccttccctggggctcctgctcatcctgcagtgcccctcccctcccaacccctgtgggggtgtcccatcactttccccagcacccacttcccacaggccttccctcctcccctgcctgctgacccggcagctcccgacagcacggccttgtttcccagggaacaatgcatctgtgtcacggacaacaatgtcctttcatgtcaggcgcactggccccggtgcacgccgggacgtggcacaaagggtgctttgtgcagctcagggatgtgagttcctggctttgccatgttggtgctgccgacccggggcctctgtccttgggtcccagttatgcaacagtcagtcgaggctgtggggctggcccaggggctttatctgtctccctctccaacttttgccaagttacccttctgggcttccgccagccaggagcccacactccctcagccctcccacacgctcctctcacctcctagctgggcttcgctgacttgaacctggccgagtttgcgggctcgggctccacggtgcgctgctgcctgctcgagggatatgacacgaagaacactcgccaggacaactccatccttaaggtaccagggatcctgccacctctgccaccctgaccacgggatggggacaaaccaggctgctcatcagaatcctctggaggagggttgttaaaaatacaggccttacctgaataggtagacatcgggaaggggcgagccctggaatcaggaaaccactatcagagggaggcctggctccgctgttggcctcagtttccccatcaagttcagggagggggccctgacagtctccagggtttggcaagcacctgcagtgggttcacgtcatgctgattgcatgccctctcttctcttgtggtcccctgacagcagccccacgagctgtggtatctttgattagtcccagcttcaaatgggagggagttaaggcacagacgttaagtcatttgcctgaagtcacagacagagctggcacctgaccaccagccagttgacttcttggcccagctcctaactcttccccaagtgacacgtggtagcctggcccccagtggattatcagtgaaaatgatggctgctgagggccccgggggcaggtttccagtggacagggcagccccacccccaggcagctgcctcgttggccttttgggaacagaaatgtctgggtgtccgtcaccagcacacctctcttcctctgtttccacacctttcacctggccgggaaaacaggctgtcctaacagcgcctctgcaaggggacccagggagagcctatggtatctggagcagagctgggcaggaggtggtgagcaggggctctggggcctcctagaccctttgcagagggaaccggagatgccagaaagggtccaggctgattgtcttgggagctggagcctttcagcctcagtcaggctgaaaagcacaggcacagtagccctgtgcacctcaggccagatcaagggagcctgggggccaggtagccttgggttcaagggaagctcccccacatcctgtctgcaaggtcttgggagtcacttcccctctctgagtcttggttccctcatcaacagccttgggctagctaggatgctttcatggccgagtgaataagccatagaaagcctcaacctagtggtcaccctttcttttttttttttttttttttttgagacagagtctcgctgtcacccaggctggagtgcagtggcacaatctcagctcactgcaagctccacctcccaggttcatgccattctcttgcctcagcctcccgagtagctgggactacaggtgcccgccaccacgcccggctaatttttgtatttttagtagagatggggtttcaccgtgttagccaggatggtctcgagcccctgacctcgtgatctgcccgccttggcctcccaaagtgctgggattacaggcgtgagccacggcacccggccgaaagcctcaacggagtggtcaccctttcataagtggtgacgtcaggatctgtgctcctcttttccacttgctcatctctgcctgtcactccatctcagcctagattttagggcccaaatcttgccacatttgggctgttgttagtttgcaatggcttcatgctttttcatcagactttcaccaaaccctgcccaccacctgctgtgccaggccccatgagccctcttccctctcctgcctgctgggttgagctctgtggtccttacacagggccggggtgagtgtgtggcttcaccatggagaagctcattgtctaggcctgtagctgatggcagtccactcactctgccaggcgcagggctgagcccaggcctcaccttgctatgccctcccctctggtctgccaggcaggccttggttccatctctgtcctccacacagggaaactgggctcagagaggttagtggctttgccagagcccccaagccaggagggggcagagagacaggattggaatccgagcccttctgaggccagagccgaaaggctgcagggggccctgcgcctgggcaggctgtgggtggccagggcatagctgattgctcccctcgccacaggtcaccattggtatgttcctgctctctggagatccctgcttcaagacgtgagtgctggcacaggcctagggagcggatgggagcccagtcccgggcactaggggtggaggaacagggactctgggtgtcctctgttttcatctggtcctgaagcagggcaccctagtcacacctgtctgtcttcccaaggccaccatcgactgccaagtccatctccatcccaggccaggattcctccctgcagctgacgtgtaagggtggtgggaccagcagtgggggcagcagcaccaactccctgactgggtcccggccccccaaggctcggcccactattctcagctcaggtacagttcctcatctgtccgcccctcccctgctagcggcccgaggggtttacctccatgtcatgcccaggtccccagggagacgctgactgaggggagagtgatggtgggagggtgtttgcatgctcctgctgggctgatgagacctgatcaccttgtgcgtgctggctgtggtgctgggccctgagatcacagctgtgccttggactgagactgatgtggcctccccatcctcaaggccctgcagtctagcagaagaaacaggcctcaatcaagccatagataaatgcatgtctacctgcaaacaggataaaagctggggaagacaggcccagaaggtgggatccatctggggccagggaaggcttccctgaggatgtagtatctgagctgcattcagggggtgaggcacagtatacctggcagagggacgtgctgggagctcttgctctcccacatactctatgactttgactggccagtttgcgtctctctgtctcagtgttctttggaaaatgggattggtaatagcaattacatcccaggtcactttggggattaactgtccacatgtgggcacctgcccagcacatggtaagcacttagtgggcactctgttttttgtttatgtttttttagacagagtcttgctctgtcgctaggctggagtgcagtggcgcaatctcacctcactgcaacctctgcctcccaggttcaagcatttctcctgcctcagcctcccgagtagctgggactacaggcgagcgccaccatgcccagatatacctttttttttttttttttttgtatttttagtagagactggatttcaccatatcagccaggatggttgccaggatggtctcagtctcctgacctcgtgatctgtctgccttggcttcccaaagtgctgggattacaggcgtgagccaccgcgcccggctgggcactctgtttttattaaattatcactggtactaatgttatgaaaaatgtgaacgagccccaacccccagaggagatggtgtggcaattaggaggagggggtgttgccaggacaggaggctctggcctgcccccaagtgtttgctgggccccctcaaccctaagcagggcccccagaggtatgagccttggactgcctccaggctgattagtgaacaaggtgtcacgtgacaaccctgatttgtcccacagaatcagttagagcacaggcctcatgtggcccagcagatgcttgccgagtgattctgcctctgggaactgagagcagtgagagaccctctgacctcaagggcccagcttccctccactcccttttccactgcagacccagctagctgaggcccagaacagaaagctgggggcttcccagcacaattactctctccagcccctggatggggttccccagaagagagatgtgtctggggactaggccaccccagcgcaggtggtgccttcgtgtgaagtagaagaggcccctcccccaggcagggtgagacttgagtgcccacttgcctctggagctggcctccccccatatgcagagaacctgttggggacttgaaaagccacatagttatggatgggcacacaggccagcctggggtgtcacaggccagcctggggtgtgttgggcgggaaggcaggtggatactcagagccctgggtaggtcccacctagtcccttttgcctcctgctggggagtgccaggaaagtctgttttgaagttgggcttatgggtgacttgggacaggactgtgggcctgtccctttgggccagaccgctcgccctcaccatgtcccttccactccaactccgctgacccaggccccttccagcctcggggcctctgccgatgctgttctctgtgcctggaaagcccttgccctcttgaggccttagctggctccctccagcaatgtgtcctggaggtctgccattaaggccgtctccttggagaagcctcccctgtccccagactgggccagacccccagtaagcactgctccctgctgtgcacctctcactgcggttgtgggtagtggaggcagtttttgttcagcgttcttcttcctcgctgacctgtggtgggcaccccacccaagtgtgccctctgtggaatgaagggacctgggttcggagggtgacctatggctcaggctggttgctgctcctctgaacctgtttttcagtctgttaaatggcgccctgccatgggaggctctgtgagggcacgttgtgaagggcgacagtgagcagcactgggtgacccctgtcacctcaccccctgccccttcctgccttccagggctgccagaggaacccgaccagaacctgtccagccctgaggaggtgttccactctggccactcccgcaactccagctatgccagccagcagtccaagatctccggtgagtggctgcctggccctgcccccgtggcctcctccttcctcgggatcccccattgtgatgctcccctgcgtcgcccctgacaggctacagcacagagcactcgcgctcctccagcctctcagacctgacgcaccgccgcaacacgtccaccagcagcagcgcctctgggggccttggcatgaccgtggagggccctgagggcagtgagcgggagcaccggcccccggagaagccgccgcggccaccccggcccctgcatctgtccgatcgctctttcaggtgaggcctactgcttggtgccccctggagaacagacctctcccggtggtgccttgaacctccgcttctttacctataacacagggaccgtaaggtccccacctcagagggttgggtggtgacgattccactagctgatggccctgaagggtgcagccatgcccggcgtgcagcaggttctgttcatggctgctcttgcggttttgtggatcagacaagagcacgatctgctaggtggccttaggaagctgacttacctgctcattgcctggcatcctcgtctataaaatcggctcatgatggcagctgcaccctattgtgcatgtgaggtttcagtgaagtacagcacggagcgcacagggacattctgagcgccgctgcggctgactggcattattgtcgtcgttctgtgcttgtacctgttactgccctgaccgttgtgacttgtccccccacgacctgacccaggcggaagaaggactcggtggagagccacccgacctgggtggacgacacgcggatcgatgcggatgccatcgtggagaagatcgtgcagagccaggacttcacagatggcagcaacaccgagggtgagccgtgctgggctggtgggggcgaggccacctgctccaagggctggccctgccgcgctcagcctccatcctctcctgtgtccccacagacagcaacctccggctgttcgtgagccgcgatggctctgccacgctgagcggcatccagcttgccaccaggtagggcaggcttagggaggggtcgtcggggcggctggggcttgggggtgagagcagagtccccacagtccactcacctggccttgaacgccaaatcttgtcgccacagtgtgaccctgggcctgtcatgtctctgaacctccctttccccatctgtcaggctgtgtggacaccaccacctcacctgggagcctggggcagtgagggcacggacaggttcggtggtttcccacagttcacaaggtcacctccagcaatgcctggtgcagggctcagcacatggcaggggcctcacacgcatttatttagaaccctcccttctacttcctcccagctccagggactcgggaagaatggtggtggtgatgcctcatgggtttactgaacaaatctttccctagcaccagctaggcactaggccctaagtgaaggcctggttcaatgcaggctgctgcctacacagcatccacagatggcaggggtagatgggaccaaagttgcgggaacgacagtttatagagtgctgcgtcacagacattcatttggagcatgttgactatgtgcctggctctccatgtgctttggctaaccaaatgaatgagcgagtgagcgaatgagcttcccacaggcgggctgctgagggcaggtggggagcccgcctaacatccacatccccagggaagaggcgtggccaggccgctgcgcagaggctaccctctcaagctgctctgctgactcctgctggccacggcctggaatggcagccatcacctcccagtagcctcctgggctgctctggggtgggggtgagggggcggtgagcaagaaggaaactgaggggctggcttccttatgggtttgtaaacacacccctccctggccccctctgaaaatgaggaagcatcttggggaaagaaaccaatctggttgggagcgagatcacagcagagctacatgctgagccccgagagtccccgactccagggctgggcctgggctcggcagggaaaggagctgaccaggtttcctgacttcccactgccctcttggtcaccctcacatccctctgagcctcagtttcttcacctgtcaagtggggcaggatgcagtgactccctgccgaggtgaccgtgaggatggggtggcacagccagatgtgcccggaagggctctgcaggccccacagactctgatgcttactatctgtgtcactgtgggcaagggacttaccatcgctggggcacggttttagcccctttgcaacacagggctggttaacagtacctgcttgtgaaacacctccagaggcctggtccagtggagcgctcaggaaatggggtatcgagggggacatgctgacctgtctctcacctgcagggtctcttctggggtctacgagccagttgtgattgaaagccattgaggagcaggtgtccgggctggagaagagtcctgctttctctggagtccagacctgtatcattccatgaggaactttccccttcagatcacctctgcgccacatctcatccatgcctcctccatgcactccagtccacactccccgtagcatcattccattgcccctcccatccatgctgggaccctcctggcccaccaaggcccaggcaccactgtgaatattctcctctgaaccactagagggcaggccaggcaggccaggcgggcccgtgcagcttgtgggcaagaaggagctggcaaggaccggcgctgctggagactgacccagccctctggctgaggacatgcagcagctcctaaatgtagagatgcctgtggctgagggggcctctctacctgtgtccccactcactccaggagcactggctttggtcacgtcttagcagcagggccttgctccgttgttcccttgccctggtggtgggggggccagaccgcctccggaatcctgccacctgtgactgtctgactgcttagtgcttcagctgtcccttccttgtgtcctgggggacctgctggcggcctcttcctgggagccatgacctcagaccccacccacactccagatcgagacccctgcctccccccggcaaatgtcctcccgctgccttgcagcctgcactttgcacatgctcacccccagcacagtcccactggcccctcacctccccttccctgagctccttcccaaggactcctggtcactgcctgctgtgcagtcagaggcccagggtccagcagcccggcgggaacgggtgctgcctcttcctccagttagctccagctcaggtctgagacccgtgctgagaaaggtctgagcaccgaccgtgccctctgcccagggctgggtcctgagcagctggttttcctgcaggaaggttggagcaagcaaagtccttctctgccctcagggtcagctgcccagactggggcggatgccagagaggcaggtgggctgtggctggactggtccggagctggcttccttaccagaaaagcctcagccttcctctggaagcatcccccgttctgggcaagggggaagggctcctttaaggggtgtgctttcccagtggggagcagtctggccctgccccctactaaagcctctgctctcagcactttcccccaagtccttgtaacttgcttgaaggtgggttctggctgccagccagtccctggacaaactctcctgccccttttaaatttcactcattttgtataaacccagcaggctggtgtttacttagccctgtagcttttttcattttttctttccgtctttcttcttgagttcacggttcaatattgcctcctcgccctggtgaggggaggtgctgcttttctgccccacctgccggctggttccagcagcgctggggcccagctggggggccgggatgggggcttctctctctgggaggggtgcaggtgccctccccaggctgggagggttccttccctagctccccatctgcccccgctggtgagagttgggcttcttggtcttggaactccctggcattgggaacagagcatttccagcatttgttgttgttgttttactcacctaacccttagaaaatgaatgttagaaggtgcctgccgaggcgggacagagtgtttgctcgcgctggagaaggctctgctcagccctgagagtcccttcctgccccaccgatactggcactttaaaaaggaagctgaccgcacagtgtccagacgaattggcccccagaagatggggagttctgtcctgcccttctgtgtctgcgtgacctcacccagcctaggagggaggtgcattcagggtagatttgcctctcattcaaagttctggggctttgggcggaaaacagccagctttggcgctgttggggagactcctccagaccaggaaccccagaaggagacagagcctgccacatcctcccacgccaggccctgggccagggtgattggactgagaatttggccacaaccaaattgatgctggctggaaccagaggccagaaagcctggccttgtccccatgtgggagccctgtcctcagccctcttgtccccttgagctcagtgaattcccaccaggtgcccacagctcctggacttcaaattctatatattgagagagttggagagtatatcagagatatttttggaaaggagttggtctatgcaatgtcagtttggaatcttcttgaaagtttaatgtttttattaggagatttaaagaaaataaaggtctacaatatctttaggtttttttttttcctgtttaccgcacaaactgaccacatggcatgtctatcaggatggagggtgtccatgttctcctctgtctttagggaggtgataaggagatgggcggaggggtgtttttttctttgactcccctcctttctaacagaatgttgccaccactgcttgagtgggctgtgtttgttcctctgtcccagcttctgttgtagaaaataacattgttaggggaactcaggctagtgtcagcgtcttggtttggggagaaaaaattaaatgtttcggtttttgtttcttttgctgttttgtttttaccttgttactttatcatattgactttagggtcaaaggcaacatcagaagaagtcagatatgtatagtgacattccaggggtggggaaggtgtagggatccagggttctcccggtcttggccacaggcacaatcatcaccttcatcgttccagattcctggggagaaaactgagaagatcgttacctgccagcctcatacggagcaaaagctctgtcctcagggccaagttctaaccactgctctgtagaccttctctgcaatcaagtggcctctaaggagcatgcctgaggacaaataactgtgcctcagtttcctcacctgcagatggggttatcaaataacacgagtgtgcagcctgacctgcaggaggtgtgagtgtgttcccaaactaaagccccaggctgccatcatttacaggcttggcttgccccgggcccctcacccccgtttctgaccatcccaagtctctctgggacaggcaagtcactctggttctttaataagcttggaggtgttgggaagcttcagtggtactggccaggccaggaggaatcaggccaccagggctccatctctatcctgggatagcattcaccccactcctcctcagggctgaccccgactcatggcccctttaaaccctgaaggccgattctgccccttcctctgttatatgcacaactgaggaaggaggtaaaagtgggctcctaggtgagcccaaagtctcctgagagataagggaaaagaattggactgtaggtttaaaaaagttgctcttggccgggcacagtggctcacgcctataatcccagcactttgggaggctgaggcaggaggcagatcacctgaagtcaccctgaccaacatggagaaaccctatctctactaaaaatagaaaaattagctgggcgtggtggtgagtgcctgtaatcgcagctactcaggaggctgaggcaggagaatcgcttgaacccaggaggtggaggttgcaatgagccaaaatcgcgccattgcactccagcctgagtgacagagcgagactccgtctcaaaaaaaaaaaaaaaaaaaaaaaaaaagttgctcttgtcagctttgggagggcagactccatagttggagatgggcttccaaccaaccaaggagataaatgccagagggagcgaaccatgccaggctcaaagcacatctctccccaaactccccaggtggggacagcaggccaaaggcctccacataacccctcagggaggcctggagtccagatgctgtactccagtatctaaacaatcactgaatcttaaagctgacaggttcaaagctcttactttgggccgagcgcagtggcttacgcctgtaatccaggcactttcggaggctgaggtgggtggatcacctgaggtcaggagtttgagaccaacctagccaacatggtgaaaacccatctctactaaaaatacaaaaattagctgggcgtgttgacacgtgcctgtaatcccagctactcggtaggctgaggcagaagaatcgcttgaacccaggaggcagaggttgcagtgagctgagatcatgccactgcactccagcgtgggtgacagagtgagactcccgtcttgggaaaaaaaaaaaaaccaaaaaaacctctttctttgggccaagcctccactgagtgccagggatacagcagcaacctcagaccctaccctcggggctgacagggctggatcaacaattgcatcagtgaattaaaaggcacaggaggctgggcaccgtggctcacgcctgtaaacttttggaggccgagttgggaggatcgcttgagcccaggagttcgacaccagcctggataacatagaactccgtctcaaaaacaaacaaacaaacaaagaaaacgttcccgactggcttccctgaggaacgtggcgtcccagtgagaccggatgggtgaggagcagccggcctgtgagtggtgggggaccgcgttcctatctcggagctgaagaagcgtggaagatgatctggcccaacatctctttgttctcagaggaagggccttccaagaccggggaggggcctgtgcgtgggtcccggtccgaaacgtgtctgggctgctgcgagaggcagtcggtgaaggaagggaggggacatccgaagggtggcccgggaggccgggcgatggtgaggagggcgcctcctctccaccaaatcctccccatccatgcgggctagggacagaccctcccccgcccaccctaggctggaaagtgaacgttctctgcacctctcccacctacagactaagtagggcacccggtttccgtgtcggcttcaccactgactcggaatgggatctacctttctctgagcctcacttttcccatctgaaaaatggaacttccgatcccgcactcccatcccactctggccccgggactctgggatacttagagattggcttttggtggggcggcgacaggactgtggccatgaaggccagggagtctgggtccccaactcggtcccattccctagagagattcgggcagcaaccggccccacaatgctcttgagaactacacttcgccgatatgcaaaggagaggaggcggttcctgctcgtctccgacgaggtgggcccgagcaggcctggggactacgactcccggcgtgctccgcagtccaaagccggaagagcgtggacccggaaccggatgtggcttgcggctcgggtggctgagcgcgcggggaaatggtgagattggcaccgtgtgccggagataggggcgtctgggggtggggtcccgggtctgctcaggagctggggcatgggcacttggaacggggattgctctcccgcccccactattgtacggacgacaacgcggaggcctagcattctctcccagcctagaaactgatccctagtcagccttctaccatctgttgaatgggaagcttagaccgtgatcgggccgcgacgccccgcttccattagtgcgccgaaatagagggtcacttcgtcagctgagacctcccttttctccaggccacggggacagaccaggtggtgggactcggcctcgtcgccgttagcctgatcatcttcacctactacaccgcctgggtgattctcttggtatgtcattctccccgtccgctgctcaccttccccgagccctggcaccgccagagcaactactatataggctctaggcacggcgctggcttcattgcctgcctcatctcttgaactctccagaacaactctatgaggaagatgccagtggtaccgcattttatagatgagatagctgaggctaggggagaaggatctggcccaagattgcatccttagccgctacacttataactctgtttccggcttgctttgacttttgggggagttctgttccttctgggttagcctgctgactcttaggcatggcaaacgccagtgatatttgtgaaggcctttaggatatttttttcttgtgggaaaacttgttggttattgcttaagaagtgcagtgtgtctggaagtgcagaacttggtatcctttagagaaaaaatattagtgaagaagccctggaggcccaggttgggagtcagtcgaggattcctcaagtaccatttgctaggctgtgaggtgccttagggcaggtctcttgtgccctgttctcttgtccccaccaccaacctatagcaggcaccaaagcaagtgcccggtaaataccaataagaaattaaggaaagaaacaaaccacgacacccaaatgccgtaatcttaaagaaaagcaaatgcagtcccagtcctctgaatgggtcagccccttagatggaggaggtgggacgtttgggcttgggggctcggcaaggcaagcaagacacaccagagctcttccctcgatgccagccattcatcgacagtcagcatgtcatccacaagtatttcctgccccgagcctatgctgtcgccatcccactggctgcaggcctcctgctgctcctgtttgtgggtaagtcatcacctcctccccttgaccctgggcagggtttcgggaagaccccacctctgaacatgcttccacactttggcggtgctggaagctgcttgccccgaactcacccgtggggttttcctgttcatccttcgaggctgccagtcagtaacctctgggtttcctggtgccccaggctttttggactccaatgacctgtctacctctttcctgccccaaccccatcatcactctgctcacacctcagtcaccctcttgtcaccctggcttctaattcctgcacctctctctctcatggcttcctagggatggggactgtgtctccatcattactgcacatctagaacaggctgtggcactgaggctgtgctcagaaagtcatttggatgagtcagtcaacagccgggtgcctggatgatgggtggatggatgggtgggtgggtgaggtgtaggaggaggtgggtaggtatgtaggtggacagacaagtggttgaccgggtgatcgatagatgggtggatcttgttccccttggaatctgaaacactaaatgcagcatcttgcttgaggcaggcactcagttggtgtttgttgagtgaatgtgagtagacatatgccttgacgaatgactagggagataagcaggttccctggaggatggttgggtaggttcacagccctgtgtgtgggtggctctgctgtgtcatgccctggcctcccagcagccctgagcttagatcttatgtggcctttctggtctgtgtatcccaggactgttcatctcctacgtgatgctgaagagcaagagagtgaccaagaaggctcagtgaaggtcccgcagggatgaggctgccagccccttctctgcttcccctccagcacagggaccaagtgggggagcctgcagaacctgtccaggcacagtggctcctcaagcctgcctgtcctgcagagtccccatggcatggagcttacacctgactgactggagccccctccccgactcccacttccagaagctaggagggagggatacctggaagactccggtcacctccttcttgctcagggcctaaaagatgctggtcctcccaacctcactctcagactccctgccaccttttcccctgggttctgccgtcttgcctcacttcccctcctgtcacatgctgacgttggacttagcaggttctaaggccacatgtgtgacctctctgacttctcttcctccaccaaggcagctttccttaccctgacacagccccagaccccacaaagccttctggacctggaaagcctggggaaggactgacagaccccaggaccagccctggggctcagggcagccaccccgggccgctgaccgactgacctctcctcacggaggcccagccccaaagccccagggctggcccgtttgggacagctgaccaataaacactgatggtgtgtttgtctctgtgccgtgtttacccagggtcggggctggagcgggctgggagtggtcttgggtcaggagatcctgtacagtaggggtgactcgggggccttctgccctgaccctgtgcgctggggataaagcagggactgggacagatgtgcttcctacccaatggagctcacagctgggagtcattggaggccctggcacccctctgccatgcctcccctgtgccagcttggccgggttggatttattactttagggacccttgggccactcccctaaaaaccccacagcccaacttaacgtggccctgagcagtgaaggctgctctgtgttcaggttggctggactggcccagcccctagccttccagcagtcccaccgtgcctgggcagctggctctcccattttccacggcacctagtgtaaacccccattcctcaaacccggttccctcacttttcttccagttggtggaggtatcttcctcatcacagaggaaaaaggccaactgcagacacctgccctgtccccacctgctccatgctctgtcctccagtccaggcagaactgcccacttgggctttggatcctaaacccccaactactgtagtgggagcctgaggtcacagttggcgccccctgttgtgagaaagatctccatgggatcctcccattgttccctgagtgtgctctgggatcccacttacaggccctccgtcaatccagtagttcccactaagtatctccctctgtccatttcaccaccaagcttccccaaagggggtccgcatctgtctcctgcatttcttcacctcctgccgcactcagcatctgtccccatctctccaggcaggctgcagccactgaggccaccagcggtgtccactctttattttttttttttttaatttttctttgtgacaaagttttgctcttgttgcccaggctggagtgcaatggtgtgatctcagctcactgcaacctccacctcccgagttcaagtgattctcctgcctcagcctcccaagtagctgggattacaggcatgtgccaccacacccagctaattttgtatttttagtagagacggggtttctccatgttggtcaggctggtcttgaactctcgacctcaggctatctgcctgcctcggccccccaaagtcctgggattacaggcatgagccaccgtgcccagttgatgtccactctttaaatccaaaggatgtttgcttgactctcagctgcatttggcctgtgacatcccctgatccactgtcagccgctttcttgatgtctgtgatgaccattctgtttgtttgtttgtggcagagtttcgctctgttgcccaggctggagtgcggtggtgcgatcttggctcactgcaacctctgcctcctgggttcaagtgatcctcctgcttcagtctcccgagtagctgggattacaggcacctgccaccacgcccagctaattttttgtatttttagtagagatggggttttgccatgttggccaggctggtctcaaactcctgacctcaggtgatctgcctgcctcagcctcccaaagtgctggaattacaggcatgagccaccaagaccggctgtgatgatcattctgctatttgatgtctcactcatgccgtcttctgccatgtgatgctgggctcctcagggttgtgtcacaagccgtctcacccttgccaggctcacctctggcccgatgcactgcacatggcccagctgcccacctgacatcctcatcggatgccatggtgggaaactcaaatgcatcctctcatgagctgaattctcagacttctcccaaatctggctgttcccctcatgcccttccccctctagtgactggtgtaccatgtccctaacctggctttcttccttatccccccatccacaggaccctgagctttatcagttctccctccccttttctcctggcctctagccaccttcctgatgcaaagccaccatcctctgccctaagtcacagatggcttcctcactgcttctcctgcccactctggccccaccagtccaactatgcataacaaccagtgcccttcaaaaatgcacaccttgaccaggcacggtggctcacgcctgtaatcccagcactttgggaggccaaggtgggcagatcacttgaggtcaggagttggagaccagcctggccaacttggtgaaaccccgtctctactaaaaatacaaaaatggggccgggcgcggtggctcacgcctgtaatcccagcactttgggaggctgaggcaggcggatcacaaggtcaggagctcgagaccatcctggctaacacggtgaaactccgtctctactaaaaaaaaatacaaaaaattagccgggcgtggtggcaggcgcctgtagtcccagctacttgggaggctgagtcaggagaatggcatgaacccgggaggtggagcttgcagtgagctgagatggtgccactgcactccagcctgggcgacagagcgagactccgtctcgaaaaaaaaaaaaaatacaaaaatggctgggcgcggtggctcatgcctgtaatcccagcactttgggaggctgaggtgggcggatcacaaggtcaggagatcaagaccatcctggccaacatggtgaaaccccggctctactaaaaatacaaaaattagctggatgtggtggcgaatgcctgtaatcctagctactcgggaagctgaggcaggagaattacttgaaccggggagtcagaggttgaactgagctgggatcatgccactgcactccagcctggcgacagagagagactgtctcaaaaaaaaaaaaaaaaaaaaagcccagcatggtagcacgcggctgtagccccagctactcaggaggctgaggcagaggaatctcttgaacctaggaggcggaggttgcagttagctaagaccgcgctactgcactccagcctgggcgacagagcaagactctgtctcagaaaaaaagaaaaaaaaaattagctgggcatggtgacgcctgcctataatcccagctacttgggaggctgaggcatgagaatcacttgaacccagaggcagaggttgcagtgagccgagattgcgccattgcactccagcgcgggccacagagggagattctgtcttaaaacaaacaaacaaaaccctcgaaccttggtgcctcacacacacacccatactcacagtacctctctgggtccccacagggccctgcctctcagcctgctttcccctcttcactccagccactctggcctttcacttcctggactcaccaaggccctttgcacgtcctactcgccttggtcccatagacactcatccggcacaggcttgtgccaggcactcagccaggaggcaggaatgacatggccccgctttcatggcattcccactccagggggagacgtgataaacaataaacaagacagtctctgacagtgttagggtggtaaagaaaataaaggtgatgtgatcaggagtggggggaggggagcgctctgttggagtctggcaaggtgacgaaagaacgaggcgagtagcagtctggggtcaagagtttcaagcagagggaatagcaaaatgcagaggcttgaatgggagagtttggcggctaaggaacaggaggggccgggcggctcagtggttaagtgtagggtgagtggtttgagatgggcctggggtcagggtgaggggtttgggttttgttccattgccatgggagccactggaggctttaagcacgagagtgacatcatccaagttatgcttttaaagatcacgcgggcagctgagcccctccctctcgctcaccactaaatccccagggcctagcactgctggcccacagtgggtgttcaatatctatgtgttcaatgaatggatgtccccgactttgctgtgtgacctagaggtagtgacttctttctctagatctctcagttttttcacccaaaagacgggcaatggggatttcacgccggaatgggtgggtggcacaggatttaggttactcgcctccccaggcggccctagcgacccgagtccccacgccgagggcggaaaatgggggtgctcccttcgagggaccccagccaatgtccggcggccccgccccagccggaccgaggtctgaaggatgctgcagccgtgggggcgggacccgcaggcgatcgccagcgcctcccgcgtggattggatgcagccgcagtcggcgccatgctattggtcggccgcgaggtaggggcggggcctgattcctgcagcggggcggcggggaatgcggccaaagcccgggaagctgctgcgggggcgatggctgcgccgagcccggggccccgcgaggtaggtgcggacccgagagaggacaggagagggaagggttggtgggcaggggccgggcctcccctcggcgagcggcgcggacacgcccccatccaagcctgggaggggccctgcagccggcgaagaccaggacacgccccacacggggcgccaggtatcccgaggggcggcctggcggatatccctcaacacttcctcagctttctcattgggaaaatggagaggatgctaaagctcctccttcagggagctgttaggaggtcaagctctcatccagtgcggggcacgcggtggatgcccactactggtgggtcagcggctatgaaaa

SEQ ID NO: 1192 - DNA, 4625 bp, Homo sapiens
gaggcggcgcctccgctgcccggggccggcccggtgcctgccctgaggaggcccgaggccggacgttcccggcccgcagcgaccccgacgcgcctcctggagaggcccccgagctcctggcagccccctgggggtgccccaccttccccggcttcacctgcgctggccgcccggcacccagcggcgagggcacctcccccggccgccagcggggcgggggcggggccgccctccgccctcagccttaccggccagccagcccgcccgccgccctcagtctcaccggtccgcccggccgcgcggcgtgagctccccggacatcgcgtctcgggatgctgcaagccagcgcggccgctcgcgcgcagccccgcacctccgcccctgcctctgcctcctgggccatgccctgctgtttacatgccggtgaggtccccggccgctccgaacccctccgagccccggctccccgagggtgaagcccgccggcccgcgaactggactggtggatctctcagacctggggccccggactccgatctccgccgtctccgccaccatcagggcgggatccggctctggtgttttgaggagggggtgtggtgtagggaaaggaatcccgtccctctccaccttttttcgccttcggggcttcagactcagggaactcgctcatggctttcttgatgaagaagaagaaattcaaattccaaactactttcaccctggaggagctgactgcggttcccttcgtgaacggggtcctcttctgcaaggtccggctgctggatggaggggattttgtcagcttgtcgtcaagggaggaggtacaggagaactgtgtgcggtggcgaaagaggttcaccttcgtgtgtaagatgagtgctaacccggccaccggcctgctggacccctgtgtcttccgtgtgtctgtgcgcaaggagctgaaaggcgggaaggcttattccaagctgggcttcgctgacttgaacctggccgagtttgcgggctcgggctccacggtgcgctgctgcctgctcgagggatatgacacgaagaacactcgccaggacaactccatccttaaggtcaccattggtatgttcctgctctctggagatccctgcttcaagacgccaccatcgactgccaagtccatctccatcccaggccaggattcctccctgcagctgacgtgtaagggtggtgggaccagcagtgggggcagcagcaccaactccctgactgggtcccggccccccaaggctcggcccactattctcagctcagggctgccagaggaacccgaccagaacctgtccagccctgaggaggtgttccactctggccactcccgcaactccagctatgccagccagcagtccaagatctccggctacagcacagagcactcgcgctcctccagcctctcagacctgacgcaccgccgcaacacgtccaccagcagcagcgcctctgggggccttggcatgaccgtggagggccctgagggcagtgagcgggagcaccggcccccggagaagccgccgcggccaccccggcccctgcatctgtccgatcgctctttcaggcggaagaaggactcggtggagagccacccgacctgggtggacgacacgcggatcgatgcggatgccatcgtggagaagatcgtgcagagccaggacttcacagatggcagcaacaccgaggacagcaacctccggctgttcgtgagccgcgatggctctgccacgctgagcggcatccagcttgccaccagggtctcttctggggtctacgagccagttgtgattgaaagccattgaggagcaggtgtccgggctggagaagagtcctgctttctctggagtccagacctgtatcattccatgaggaactttccccttcagatcacctctgcgccacatctcatccatgcctcctccatgcactccagtccacactccccgtagcatcattccattgcccctcccatccatgctgggaccctcctggcccaccaaggcccaggcaccactgtgaatattctcctctgaaccactagagggcaggccaggcaggccaggcgggcccgtgcagcttgtgggcaagaaggagctggcaaggaccggcgctgctggagactgacccagccctctggctgaggacatgcagcagctcctaaatgtagagatgcctgtggctgagggggcctctctacctgtgtccccactcactccaggagcactggctttggtcacgtcttagcagcagggccttgctccgttgttcccttgccctggtggtgggggggccagaccgcctccggaatcctgccacctgtgactgtctgactgcttagtgcttcagctgtcccttccttgtgtcctgggggacctgctggcggcctcttcctgggagccatgacctcagaccccacccacactccagatcgagacccctgcctccccccggcaaatgtcctcccgctgccttgcagcctgcactttgcacatgctcacccccagcacagtcccactggcccctcacctccccttccctgagctccttcccaaggactcctggtcactgcctgctgtgcagtcagaggcccagggtccagcagcccggcgggaacgggtgctgcctcttcctccagttagctccagctcaggtctgagacccgtgctgagaaaggtctgagcaccgaccgtgccctctgcccagggctgggtcctgagcagctggttttcctgcaggaaggttggagcaagcaaagtccttctctgccctcagggtcagctgcccagactggggcggatgccagagaggcaggtgggctgtggctggactggtccggagctggcttccttaccagaaaagcctcagccttcctctggaagcatcccccgttctgggcaagggggaagggctcctttaaggggtgtgctttcccagtggggagcagtctggccctgccccctactaaagcctctgctctcagcactttcccccaagtccttgtaacttgcttgaaggtgggttctggctgccagccagtccctggacaaactctcctgccccttttaaatttcactcattttgtataaacccagcaggctggtgtttacttagccctgtagcttttttcattttttctttccgtctttcttcttgagttcacggttcaatattgcctcctcgccctggtgaggggaggtgctgcttttctgccccacctgccggctggttccagcagcgctggggcccagctggggggccgggatgggggcttctctctctgggaggggtgcaggtgccctccccaggctgggagggttccttccctagctccccatctgcccccgctggtgagagttgggcttcttggtcttggaactccctggcattgggaacagagcatttccagcatttgttgttgttgttttactcacctaacccttagaaaatgaatgttagaaggtgcctgccgaggcgggacagagtgtttgctcgcgctggagaaggctctgctcagccctgagagtcccttcctgccccaccgatactggcactttaaaaaggaagctgaccgcacagtgtccagacgaattggcccccagaagatggggagttctgtcctgcccttctgtgtctgcgtgacctcacccagcctaggagggaggtgcattcagggtagatttgcctctcattcaaagttctggggctttgggcggaaaacagccagctttggcgctgttggggagactcctccagaccaggaaccccagaaggagacagagcctgccacatcctcccacgccaggccctgggccagggtgattggactgagaatttggccacaaccaaattgatgctggctggaaccagaggccagaaagcctggccttgtccccatgtgggagccctgtcctcagccctcttgtccccttgagctcagtgaattcccaccaggtgcccacagctcctggacttcaaattctatatattgagagagttggagagtatatcagagatatttttggaaaggagttggtctatgcaatgtcagtttggaatcttcttgaaagtttaatgtttttattaggagatttaaagaaaataaaggtctacaatatctttaggtttttttttttcctgtttaccgcacaaactgaccacatggcatgtctatcaggatggagggtgtccatgttctcctctgtctttagggaggtgataaggagatgggcggaggggtgtttttttctttgactcccctcctttctaacagaatgttgccaccactgcttgagtgggctgtgtttgttcctctgtcccagcttctgttgtagaaaataacattgttaggggaactcaggctagtgtcagcgtcttggtttggggagaaaaaattaaatgtttcggtttttgtttcttttgctgttttgtttttaccttgttactttatcatattgactttagggtcaaaggcaacatcagaagaagtcagatatgtatagtgacattccaggggtggggaaggtgtagggatccagggttctcccggtcttggccacaggcacaatcatcaccttcatcgttccagattcctggggagaaaa

SEQ ID NO: 1193 - protein, 223 aa, Homo sapiens
EAAPPLPGAGPVPALRRPEAGRSRPAATPTRLLERPPSSWQPPGGAPPSPDAARHPAARAPPPAASGAGAGPPSALSLTGQPARPPPSVSPVRPAARRELPGHRVSGCCKPARPLARSPAPPPLPLPPGPCPAVYMPVRSPAAPNPSEPRLPEGEARRPANWTGGSLRPGAPDSDLRRLRHHQGGIRLWCFEEGVWCRERNPVPLHLFSPSGLQTQGTRSWLS

SEQ ID NO: 1194 - DNA, 3991 bp, Homo sapiens
gctgctggatggaggggattttgtcagcttgtcgcccacagggaggaggtacaggagaactgtgtgcggtggcgaaagaggttcaccttcgtgtgtaagatgagtgctaacccggccaccggcctgctggacccctgtgtcttccgtgtgtctgtgcgcaaggagctgaaaggcgggaaggcttattccaagctgggcttcgctgacttgaacctggccgagtttgcgggctcgggctccacggtgcgctgctgcctgctcgagggatatgacacgaagaacactcgccaggacaactccatccttaaggtcaccattggtatgttcctgctctctggagatccctgcttcaagacgtgagtgctggcacaggcctagggagcggatgggagcccagtcccgggcactaggggtggaggaacagggactctgggtgtcctctgttttcatctggtcctgaagcagggcaccctagtcacacctgtctgtcttcccaaggccaccatcgactgccaagtccatctccatcccaggccaggattcctccctgcagctgacgtgtaagggtggtgggaccagcagtgggggcagcagcaccaactccctgactgggtcccggccccccaaggctcggcccactattctcagctcagggctgccagaggaacccgaccagaacctgtccagccctgaggaggtgttccactctggccactcccgcaactccagctatgccagccagcagtccaagatctccggctacagcacagagcactcgcgctcctccagcctctcagacctgacgcaccgccgcaacacgtccaccagcagcagcgcctctgggggccttggcatgaccgtggagggccctgagggcagtgagcgggagcaccggcccccggagaagccgccgcggccaccccggcccctgcatctgtccgatcgctctttcaggcggaagaaggactcggtggagagccacccgacctgggtggacgacacgcggatcgatgcggatgccatcgtggagaagatcgtgcagagccaggacttcacagatggcagcaacaccgaggacagcaacctccggctgttcgtgagccgcgatggctctgccacgctgagcggcatccagcttgccaccagggtctcttctggggtctacgagccagttgtgattgaaagccattgaggagcaggtgtccgggctggagaagagtcctgctttctctggagtccagacctgtatcattccatgaggaactttccccttcagatcacctctgcgccacatctcatccatgcctcctccatgcactccagtccacactccccgtagcatcattccattgcccctcccatccatgctgggaccctcctggcccaccaaggcccaggcaccactgtgaatattctcctctgaaccactagagggcaggccaggcaggccaggcgggcccgtgcagcttgtgggcaagaaggagctggcaaggaccggcgctgctggagactgacccagccctctggctgaggacatgcagcagctcctaaatgtagagatgcctgtggctgagggggcctctctacctgtgtccccactcactccaggagcactggctttggtcacgtcttagcagcagggccttgctccgttgttcccttgccctggtggtgggggggccagaccgcctccggaatcctgccacctgtgactgtctgactgcttagtgcttcagctgtcccttccttgtgtcctgggggacctgctggcggcctcttcctgggagccatgacctcagaccccacccacactccagatcgagacccctgcctccccccggcaaatgtcctcccgctgccttgcagcctgcactttgcacatgctcacccccagcacagtcccactggcccctcacctccccttccctgagctccttcccaaggactcctggtcactgcctgctgtgcagtcagaggcccagggtccagcagcccggcgggaacgggtgctgcctcttcctccagttagctccagctcaggtctgagacccgtgctgagaaaggtctgagcaccgaccgtgccctctgcccagggctgggtcctgagcagctggttttcctgcaggaaggttggagcaagcaaagtccttctctgccctcagggtcagctgcccagactggggcggatgccagagaggcaggtgggctgtggctggactggtccggagctggcttccttaccagaaaagcctcagccttcctctggaagcatcccccgttctgggcaagggggaagggctcctttaaggggtgtgctttcccagtggggagcagtctggccctgccccctactaaagcctctgctctcagcactttcccccaagtccttgtaacttgcttgaaggtgggttctggctgccagccagtccctggacaaactctcctgccccttttaaatttcactcattttgtataaacccagcaggctggtgtttacttagccctgtagcttttttcattttttctttccgtctttcttcttgagttcacggttcaatattgcctcctcgccctggtgaggggaggtgctgcttttctgccccacctgccggctggttccagcagcgctggggcccagctggggggccgggatgggggcttctctctctgggaggggtgcaggtgccctccccaggctgggagggttccttccctagctccccatctgcccccgctggtgagagttgggcttcttggtcttggaactccctggcattgggaacagagcatttccagcatttgttgttgttgttttactcacctaacccttagaaaatgaatgttagaaggtgcctgccgaggcgggacagagtgtttgctcgcgctggagaaggctctgctcagccctgagagtcccttcctgccccaccgatactggcactttaaaaaggaagctgaccgcacagtgtccagacgaattggcccccagaagatggggagttctgtcctgcccttctgtgtctgcgtgacctcacccagcctaggagggaggtgcattcagggtagatttgcctctcattcaaagttctggggctttgggcggaaaacagccagctttggcgctgttggggagactcctccagaccaggaaccccagaaggagacagagcctgccacatcctcccacgccaggccctgggccagggtgattggactgagaatttggccacaaccaaattgatgctggctggaaccagaggccagaaagcctggccttgtccccatgtgggagccctgtcctcagccctcttgtccccttgagctcagtgaattcccaccaggtgcccacagctcctggacttcaaattctatatattgagagagttggagagtatatcagagatatttttggaaaggagttggtctatgcaatgtcagtttggaatcttcttgaaagtttaatgtttttattaggagatttaaagaaaataaaggtctacaatatctttaggtttttttttttcctgtttaccgcacaaactgaccacatggcatgtctatcaggatggagggtgtccatgttctcctctgtctttagggaggtgataaggagatgggcggaggggtgtttttttctttgactcccctcctttctaacagaatgttgccaccactgcttgagtgggctgtgtttgttcctctgtcccagcttctgttgtagaaaataacattgttaggggaactcaggctagtgtcagcgtcttggtttggggagaaaaaattaaatgtttcggtttttgtttcttttgctgttttgtttttaccttgttactttatcatattgactttagggtcaaaggcaacatcagaagaagtcagatatgtatagtgacattccaggggtggggaaggtgtagggatccagggttctcccggtcttggccacaggcacaatcatcaccttcatcgttccagattcctggggagaaaa

SEQ ID NO: 1195 - protein, 133 aa, Homo sapiens
MLEGACRGGTECLLALEKALLSPESPFLPHRYWHFKKEADRTVSRRIGPQKMGSSVLPFCVCVTSPSLGGRCIQGRFASHSKFWGFGRKTASFGAVGETPPDQEPQKETEPATSSHARPWARVIGLRIWPQPN

SEQ ID NO: 1196 - DNA, 3998 bp, Homo sapiens
gtctgatggggccatcccaccctgctggggagcacagcttgccctccctcccctccttctcttctggcgttgcctgctgggtgccatcggagcagtcctcattacttcccacttttgcccaacttctgctgctgtgaccagtcgcatacacgtggacaccgtggggactgcccctccatacagctcctctggaggaggtacaggagaactgtgtgcggtggcgaaagaggttcaccttcgtgtgtaagatgagtgctaacccggccaccggcctgctggacccctgtgtcttccgtgtgtctgtgcgcaaggagctgaaaggcgggaaggcttattccaagctgggcttcgctgacttgaacctggccgagtttgcgggctcgggctccacggtgcgctgctgcctgctcgagggatatgacacgaagaacactcgccaggacaactccatccttaaggtcaccattggtatgttcctgctctctggagatccctgcttcaagacgccaccatcgactgccaagtccatctccatcccaggccaggattcctccctgcagctgacgtgtaagggtggtgggaccagcagtgggggcagcagcaccaactccctgactgggtcccggccccccaaggctcggcccactattctcagctcagggctgccagaggaacccgaccagaacctgtccagccctgaggaggtgttccactctggccactcccgcaactccagctatgccagccagcagtccaagatctccggctacagcacagagcactcgcgctcctccagcctctcagacctgacgcaccgccgcaacacgtccaccagcagcagcgcctctgggggccttggcatgaccgtggagggccctgagggcagtgagcgggagcaccggcccccggagaagccgccgcggccaccccggcccctgcatctgtccgatcgctctttcaggcggaagaaggactcggtggagagccacccgacctgggtggacgacacgcggatcgatgcggatgccatcgtggagaagatcgtgcagagccaggacttcacagatggcagcaacaccgaggacagcaacctccggctgttcgtgagccgcgatggctctgccacgctgagcggcatccagcttgccaccagggtctcttctggggtctacgagccagttgtgattgaaagccattgaggagcaggtgtccgggctggagaagagtcctgctttctctggagtccagacctgtatcattccatgaggaactttccccttcagatcacctctgcgccacatctcatccatgcctcctccatgcactccagtccacactccccgtagcatcattccattgcccctcccatccatgctgggaccctcctggcccaccaaggcccaggcaccactgtgaatattctcctctgaaccactagagggcaggccaggcaggccaggcgggcccgtgcagcttgtgggcaagaaggagctggcaaggaccggcgctgctggagactgacccagccctctggctgaggacatgcagcagctcctaaatgtagagatgcctgtggctgagggggcctctctacctgtgtccccactcactccaggagcactggctttggtcacgtcttagcagcagggccttgctccgttgttcccttgccctggtggtgggggggccagaccgcctccggaatcctgccacctgtgactgtctgactgcttagtgcttcagctgtcccttccttgtgtcctgggggacctgctggcggcctcttcctgggagccatgacctcagaccccacccacactccagatcgagacccctgcctccccccggcaaatgtcctcccgctgccttgcagcctgcactttgcacatgctcacccccagcacagtcccactggcccctcacctccccttccctgagctccttcccaaggactcctggtcactgcctgctgtgcagtcagaggcccagggtccagcagcccggcgggaacgggtgctgcctcttcctccagttagctccagctcaggtctgagacccgtgctgagaaaggtctgagcaccgaccgtgccctctgcccagggctgggtcctgagcagctggttttcctgcaggaaggttggagcaagcaaagtccttctctgccctcagggtcagctgcccagactggggcggatgccagagaggcaggtgggctgtggctggactggtccggagctggcttccttaccagaaaagcctcagccttcctctggaagcatcccccgttctgggcaagggggaagggctcctttaaggggtgtgctttcccagtggggagcagtctggccctgccccctactaaagcctctgctctcagcactttcccccaagtccttgtaacttgcttgaaggtgggttctggctgccagccagtccctggacaaactctcctgccccttttaaatttcactcattttgtataaacccagcaggctggtgtttacttagccctgtagcttttttcattttttctttccgtctttcttcttgagttcacggttcaatattgcctcctcgccctggtgaggggaggtgctgcttttctgccccacctgccggctggttccagcagcgctggggcccagctggggggccgggatgggggcttctctctctgggaggggtgcaggtgccctccccaggctgggagggttccttccctagctccccatctgcccccgctggtgagagttgggcttcttggtcttggaactccctggcattgggaacagagcatttccagcatttgttgttgttgttttactcacctaacccttagaaaatgaatgttagaaggtgcctgccgaggcgggacagagtgtttgctcgcgctggagaaggctctgctcagccctgagagtcccttcctgccccaccgatactggcactttaaaaaggaagctgaccgcacagtgtccagacgaattggcccccagaagatggggagttctgtcctgcccttctgtgtctgcgtgacctcacccagcctaggagggaggtgcattcagggtagatttgcctctcattcaaagttctggggctttgggcggaaaacagccagctttggcgctgttggggagactcctccagaccaggaaccccagaaggagacagagcctgccacatcctcccacgccaggccctgggccagggtgattggactgagaatttggccacaaccaaattgatgctggctggaaccagaggccagaaagcctggccttgtccccatgtgggagccctgtcctcagccctcttgtccccttgagctcagtgaattcccaccaggtgcccacagctcctggacttcaaattctatatattgagagagttggagagtatatcagagatatttttggaaaggagttggtctatgcaatgtcagtttggaatcttcttgaaagtttaatgtttttattaggagatttaaagaaaataaaggtctacaatatctttaggtttttttttttcctgtttaccgcacaaactgaccacatggcatgtctatcaggatggagggtgtccatgttctcctctgtctttagggaggtgataaggagatgggcggaggggtgtttttttctttgactcccctcctttctaacagaatgttgccaccactgcttgagtgggctgtgtttgttcctctgtcccagcttctgttgtagaaaataacattgttaggggaactcaggctagtgtcagcgtcttggtttggggagaaaaaattaaatgtttcggtttttgtttcttttgctgttttgtttttaccttgttactttatcatattgactttagggtcaaaggcaacatcagaagaagtcagatatgtatagtgacattccaggggtggggaaggtgtagggatccagggttctcccggtcttggccacaggcacaatcatcaccttcatcgttccagattcctggggagaaaa

SEQ ID NO: 1197 - protein, 312 aa, Homo sapiens
MSANPATGLLDPCVFRVSVRKELKGGKAYSKLGFADLNLAEFAGSGSTVRCCLLEGYDTKNTRQDNSILKVTIGMFLLSGDPCFKTPPSTAKSISIPGQDSSLQLTCKGGGTSSGGSSTNSLTGSRPPKARPTILSSGLPEEPDQNLSSPEEVFHSGHSRNSSYASQQSKISGYSTEHSRSSSLSDLTRNTSTSSSASGGLGMTVEGPEGSEHRPPEKPPRPPRPLHLSDRSFRRKKDSVESHPTWVDDTRIDADAIVEKIVQSQDFTDGSNTEDSNLRLFVSRDGSATLSGIQLATRVSSGVYEPVVIESH

SEQ ID NO: 1198 - DNA, 22729 bp, Mus musculus
ccacttttctttccttgagacaagatcttgttccgtggtccaggctgcattgaacttgtggccttccaagtgccatgattacaggtgtgccctgtcacagatgccatgattacaggtgtgccctgtcacaggtgccatgattacacgtgtgcccagtcacaggtgccatgattacaggtgtgtcctgtcacaggtaccatgactacaggtgtgccctgtcacagatgccatgactacaggtgtgccctgtcacaggtgccatgattacaggtgtgccgtcacaggtgccatgattacaggtgtgccctgtcacaggtgtcatgattacaggtgtgccctgtcacaggtgccaggattacacatgtgccctgtcacaagtgccatgattacaggtgtgtcctgtcacaggtaccatgattataggtgtgccctgtcacagatgccatgattacaggtgtgccctgtcacaggtgccatgattacaggtgtgctctgtcacagatgccaggattacacatgtgccctgtcacaggtgccatgattacaggtgtgtcttgtcacaggtgccatgattacaggtgtgcccagtcacaggtgccatgattacaggtgtgcccagtcacaggtgccatgattacaggtgtgtcctgtcacaggtaccatgatcacaggtgtgccctgtcacagatgccatcactacaggtgtgccctgtcacaggtgccatgattacaggtgtgccctgtcacaggtgccatgattacaggtgtgctgtcacaggtgtcatgattacaggtgtgccctgtcacaggtgccatgattacaggtgtgctgtcacaggtgtcatgattacaggtgtgccctgtcacaggtatcatgattacaggtgtgccctgtcacagatgccaggattacacgtgtgccctgtcacaagtgccatgattacaggtatgccctgtcacaaacagccctcacttcagttttaattagttagggtcaccttggctatatgagccacatgttggcttggtagccattagttcttgggcaccagcacagatgacagcatttctattacctgaggggaggagtagccatggattctgtctcaagagacactcagcctggctttaaacccccgcacagtctgctgtgtgtcctagacaggttgcttgtatgtgctgggaccgggcactcaggtagtgtactggctggttttgtgtgtcaacttgacacagctggagttatcacagatagaggagcttcagttgagaaaatgcctccatgagatccagctgtaaggcattttctcacctagtgatcaaggggggagatccccttgtgggtggtgccatctctgggctggtaatcttggttctataagagagcaggctgagcaagccaggggaagcaagccagtaaagaacatccctccatggcctctgcatcagctcctgctttctggcctgcttgagttccagtcctgacttccttggtgatgaacagcaatgtggaagagtaagctgaataaaccctttcctccccaactgcttcttggtcatgatgtttgtgcaggaatagaaaccctgactaagacaggtagagagggtagctccagtgagcagcactggagagattgcccctgcctcacctccagggtccgcacgtgcgccagcatctggggaagtctctgaatctcgttctcactaatgtcgagtgtccgcaggctccgcagctcccccagggtgtcaggaagctccttcagcttgttgtctgcagagacccagatggcaaactcagtgccccagagcctccggccgcccagggaatgtggccgggaggctgtcactgcttattagccgagcagctcaggacacctggccttccctcccggggcctcgtctctgtaatacagcaccactgtctcccatcagtcacaggatgagctgacactgtgcagaggccaggggcagcaagagaacgatgaagagcttggaccacggggaggccagtcctctttggaggatgaaaacactaccctggcacctggctagtcacttacctcactgcagggtgggagtcctgtgcaagctactgctctgagcctcactttcctcatgttagctgggcatgccccatcctctgcctgccttgaggacttgtcaggccagccacagtcgtggggccagcatcagtcggagtgtcccgagccacaaggagtggctacagcagcacctccttctgtcttgctcatcactacaccctgttcccgtcacttagcttacccgtcactacattggcctgtcttctgccccacaagtctctgattctgagggtcatggaactctttacagatatattgcctctggttgccatggagacagagggatctagcgggaggtcagtctggcctgcagcgttgccctcacactcagtggcctgactctggagttgcctgaggatggcgcgacagggctttgtgtccccaccttttacattgagcgtctggagctgcagcaggttcccaatagagcgagggagatgcgtgagttgatttctttccacattcaatacctaagaaagacaacagtgacatgagccccccccacgggacaacggtggcatctgcacactcagccctgttccatcgagcgctgaatatgcctgcagcagccctgagagggaggtataggttgctgtggtcccatttaagacatgggaaaactgagatttaagtcacgtgtccaagcccttggacacacgtgagggcttaacattgatactaatgcaggatgcctaggaattgcatgagccaatgtggaaggagaaaggtgtaagggctctggtatggtttctgctggtgagcaatggggacgtctagctcagggctagccctaaatcaagcactcaggcagagcagaagcagctgtagacaaagcaccagggagcctggagtgcccagaatctgtccttttaaaaaaatatttaaaatgttcttttttacgtgtattgcctacatgtaagtgcaatacttgtgtgcaccacctgtgtgcagtacctgaagaggccagaagagggcattagaacttctaaaactggagttgttagctgccatgctgggaacccaaccagggtcctgtgtaagaatagccagtgttcttcaccaccaagccatctctacagtccttggacaaaggcccactggggatttgtttttgggaggagaagctaaagctatgaagccatgaaatagtgtggagtataagccaggttctggaagattctcacagccaggcggcatccatgctgagcatagacggggcccactgagtgtggagtacaagccgggtcctggaagactgtcacggtcatgcggcacccacactgcgcacagctggggcggggcccactgctgactgtacatcagaacctcccttcattatagaagtctatgccctgcagccttacctgcaggactgtcagctgccccatgtcatcaggaagggctgtcagctggttctcatggagatccagaacctacagaacaaacatgtcaggcccccaaatcccagactccagagcagctgacaggtgataaggccacctcgtaccctggcagtttggtggtgccccttcctcctgcccaccggtccgcattctatctcacagatcttttatatattattatttgtagtgttttgagatgggctctctacatagcactggctatcctggaactcacaactcacactgtagatcaggctggtctcaaactccgagacccaccagcctctgagtgctgggattaaaggtgtgcatcaccatatctgtgttttttttttaaaagacttattcatttattttatgtgagtacactgtcactgtcttcagacagacacaccagaaaaaggcatcagatcccattacagatgactgtgagccaccatgtggttgctgggaattgaactcaggacctctggaagagctgacagtgctcttaacctctgagccatctctccaggccctgccccttttttgaagcaaggtctcggtatgtagtcctggctggccttgaactcagagatctgcccgcctctgctgggactaaagggatatgccagcactcccaactccagcagctcaccagctcatagtcttcttttaaggtttagagcaaggctcttaagatgtagcccaggctagatcaattctcttgcctcagcctctttgtcagtctcaggattgtagatattcgctaccatgtctggcttcagtattctcattttactgactataaaaattatgcatggcctggggtgggactcagaggcagagcgggtaatcagcatggtaaaggcttgagcatagccagttctaggccagctaggactgactgcatagtgagactactgcttaacaaaagaaccgccatggagccaaaactaccccaaccccacctgtgggagctagcgtggaggagagtgtacattttcagtctttactcctagggtaaaggacccaccctaccagcttcacctccatacagaataatctgtggctgacctgtaactatactatgatctaccatgtccaggagggatccacagggaggagggaggccatgctggtcactgaggagtcaagttgccctctctttaccagccacacacaactataaactttaacagagaacactaggagggtgtagaggctcagctgccacctggaccccagtccccgatgcctggaggacgcccagtaccttgatggtgacaaggctcaagaggctgcaggacttgggaagcagggaggtgaggtggtttgtatggacaatcaacacctaggaggaaaggggggaggggagagagagggagagggagagggggggagaaagagtgagagagagagagagagagagagagagagagaacacactgtaagagagcagcagacaggaaggctaagggcctaagggcaaggtaattggcttggcacagggcggccatgttgtgctccgtgggcacttctgaacctgactcagagggctggaagtcctagggtgaaagggagtctgggagtctagctatcctttgattctgagaaggggtcagctatcaagagcttgacctttcctgctccatggagtagtaaagtgcctttctgcaagggcggccatgacaactaataagctaacaggctgaatagttagtgtttatcccaggctgtcatgtgattgttactcagcctgtgtcaaccatggctgtttttgttagacgttaactcctgctcagaggtaagaattttgatgcactataggcagggagcacgtttccagacctggtggtgttcatgtatccacctgtgtgtaaacactttcatctccttctaactgagggagtggcggaacgcattgagtgtcctttctattaatggcactggtggtggtgtgtgtgtggggggaatgagggttcctctaagtctcatgtggttcccccaagcagacatccagcaagtgagtctgaacaagactgctcacctttttctgtagaactttgcacgttgcaaaagccccaaatggaatctaagataagacaaagacgggttagcacctcgtcacctaccagtgtctcacctatctctctgtggcgctggtgttgggaggtgactaatgacagtaagtcactgtctgggagaacagtgctgagctaggagagggctatggaagaggggagctgggggcgttgtcagccctcttcagtcagctggcaggactgcccagcctgctctggcctacctattctgtggtaccaggaaccatcgacaggtggagcctcaggcatctgtagatgtagtttccctcccccgactttcccgtcctggttaaatgccaggcacctcgaaagcatggtgaatgctgccaccgacttttgcctacagttttctgtcctgcctttctccagggttttactatgtagcccaggttgacctcaaactccccacctctgccttgcgaatgggatgctgggaatacaggtgcgttctaccccacctgcctccctttctaagtaggccctgacttttgcaagttatgttgaggccaaaagatcatctcaattcttttggaaaagaacacaatataatttcttaattagtgctcctggatgtgtctgtgtgcgcatgcttgcacacaggtgaggcagactgtgagcgtctctttccctaccttatgctttgagacagtctctcactgaacatagtctgttgactcaactggatggctggctagcaagccctcgtgctcacaggtccagcatttcattggtggagctacctgcccgtcttttacttctgccattttcaaagtctcatgccattatctgttttttccccaaggacccaagaaaacaggacagattaaattcacagcctgcgtcatcctgtttacctcagagagctcacatttagagatgtcgagaatgtcatctgccccagcttcttttgcctggggagaaaaagatgtttttttaaatgaaatgtttttgagaccgggtctcacgtcgcttcaaactcatcatgtagacaaccctggttccgactcctgtcttcctgctgcacttcccaagaactagctctgcacagcctcaagggaaaggctttggaaagtcaagccttctgggcagtggtggcgcacacctttaatcccagctctcaggaagcagaggcaggcggatctgaggttgaaggcagcctggtctacagagcaagttctaggacagccagggctacacctgagataaatccagccccacctcctgtccccccaaaagtcttccactccttctgtgtgtttacaaaattctgctcatcctgtgagcattcactgtgttttgcttcttaagattagtggtggggctggcaagatggctcagaggttaagagtactgactgctcttccaaaaggtcctgagttcaaatcccacaaccacatggtggctcacaaccacccgtaatgagatctgacgccctcttctggtgcgtctgaagacagctacagtgtacttatgtataataataaataaatctttggggctgagtgagaagggactgagcaagcggggctgactggagggagcagaggtcctaaattcaatccccaacaacgacatgaaggctcacaaccatctgtacagctacagtgtgctcacatacataaaataaataaataaatctttaaaaaaaaataaaggttagtggtaactggttatggtttttcagcctttttgttttgttttggttggctctctgcattcccttcctgagttcttgctttctcaccctgccctcagtgactgggttaggggctgtctgagcacatgcaacattttatttcctggtgcaactgaggctatttctgcagacaggatctctatagctcaggctaacctggactcacagtgtagccctctatagcactgaacctggggcagtcttcttgcctcagcctcccagaggccaagatcacaggtataagccaccacacctagttctcaaggctttaaaagaaaaaaaaaagtattcaggtaaaacatccttgtagaatggagaaaataagggaaaagcccatagatgtaaggagctggaaggggccacagccacagtgactgaggtccagcagggaaagaaaccatcaggtagtgccacacacgcatcctgcgaggaagggcactcccagggctgggaaggcagagtttcccagggtgcaaaaggggagccgaggagcccgagagaatacgctgagccttaccagacacatctggtactccaggcgttttcgagcctcctcactgggtttccgcttccgaaagaagaggggcatcctccggtgtgagctcttctggaccctagaggacggcagagagatcagcgcctgggaacttgcactgcgtccgacctgcagacaggcagctcagcagtgcagcagctgtctgcaagactgtgcgttccatgtgggccgggctgtctacctcatccagctgggccctgagcccacacgacagagcccaacactttgttttactgacaaagcaaagcctagagtagaaagaacagaacacgccaagtactctgggctcgacctactttgccactgcccctctgcggcgccggcatcaccctcccagtgctaagcgtttcccccaccaagggaagattcccccaggtgccttccaaggatgttctctgaagactctggacagactcagctgatgagtcacttccagctctggaaattgtcaggatggaaccatcaagaccaaactggaggtagccgtgacttgggggaactcaactatatcaatactagagagatctatgagttaagcaaaaatcaaaatgcaatcttcaggcaccttagcaggcttccagctactgctcatttggttctccttacagccccgtggagaatccgatgctgagtaaggtcattcatctggtgatatgacctgggttgtagaaacaccaggctgggacacttgcctttcaagtcctgatcctgtgccgcttgcacggctccttggacctcccagtttagccaagttaatcattgtgtcctgaattcagtagctggctgcccatagctggctgcaacttccagtgctgtctaagggccagcaataggaaggacataatcatttggaggaagtgtgtaactcacggcatgggctctgacacctaagacattagctgtgtcactttgtgtcactggtcggagccggtttcctcatttgtaatatggagcaatgttgccaatgctggcctctgtggggtcagtgacttcatgtatgtcaggtctatgccatagactctgccacagggtaccacacacatgacaaatgcactcaggtactattacagttgctaaggagaagagggctggaggagccttgcagtagaggacacatgtggtcctgagggatttcaggtctccatttgtgggcgtgggctgtcagaggaggttgctgggcctgcagggcctgctcaggactctccgcactcaattgcagcactcctgagagacagctccctccatccctatctgatggccacgacttaaatcccttacagatggctcactaatgactagcctccctcgcccccatcctccagatctacatttccaaataccttcttcaatgactatctctgccaattccccctccctcaccgttctcagcagggctcgttcagttctggtttgaactttcctgatggtccagcttggctgggaagaaccacacccatccttccctggcagggctggccagcggctaacctggctctgtggatggggaggtcctccaccgatgttccgattcttgggtggacctcaaggtaggccagtcactccgaagacttggccacagatacaaaccattggcccccaaaagctgagctggtgtccggtctccttcaaacatagaagtgagcaccgaaactttaaatttcagaaagacacgcaactcaggatgacaaagtctcgagattctagaaaccaaggaattgcagaattaaagactcgtgattagactcgaatagtttgtttctgtaactaacatgcacataccgcaaacaggttaggagggtactagggtggcactggtactagggtcgctcaagtcaggtgcagatcccttaggggaggggcggggccctgggctgggtcccaggggctccagagtcaccgtcaagagaagggaacgtggaccaggaaccaggacctctggtgcagccctactctgttgcccaggcaaggtgctccgaacatttaccccttccgaatcccgagctcacccacagaccaagctctgcagtcctctgccgcagacgcctgcccataagaaacagggcgaccagggtgtcgcccagagattgggtggggccagcggttctcgcgagagctgagcttttccgcctatatccggcgtgggcggagcaggatccgtcttttcggctttcggctcggaggaggcaacggtgcaactttcttcggtcgtcccgaatccgggttcatccgacaccagccgcctccaccatgccgcccaagttcgaccccaacgaggtcaaagtcggtgcgtgccctcgccgcgcccgggtgctgtcccggggcctggcgggtctcccttgggccttggctgccacgtgtgtaagaggggagggagcccgacgctctggcggcccgtgcgccttagggtaaggcctggcccgggacatctgaagcccgacggcagcgcgcagggcggcctgcgccgcagaggttctgattttgctttttcttcagtgtacctgaggtgcaccggaggcgaggtcggcgccacatccgccttggccccgaagatcggtcctctgggtctggtaagtcgtcgctcccgagccgtagacctctaacgtgcatgctgtttggcctgtagatgtgttctgtccccgtggagggcagaagaggccaccatgtccctggtgcaggccgggatgtgggtgctgggacttgggacgcaaaggaaaactgagataacacgtgcacggaggctcgtgccacagcccggttgaggcagccattggacttgcttaaatccactagcctccgtgggtaacgcacgggaacctagtgtttaaagctccgagggttccccattgcagcagaaagtgttttgctttgttagcccttactgcagagttgtcttagtgaagaaggatgtggagccattgtgggcaggctcctgtgggacggtgaggagggctggcggtgagcttgaaggtcctggcttcaactttgggcacatggtaacgaatgctattatttctacagtctccgaagaaagttggcgatgacattgccaaggctaccggtgactggaagggtctcagaattacagtgaaactgaccatccagaacagacaggcccaggtatttacattgcttgctgtggggggttgagggaagggttgagatagcagccctcaggaatcatgggtcttggcaaagatttccctgtcccggtgaatcggattttatccttgtgggagggctatacgacagggttcactgtaagtcagtagtaggtgccagggtgcaggagtccgccatgctagggattcaactctggaggtgaggccagcaggaagcaccttagctagccgagctgttttttcggggccctttagcgtgtctggtggtggttggttttctgggctgtgttcacatcaagtctctttgcagatcgaggtggtgccttctgcctcagccctgatcatcaaagccctcaaggagccaccgagagacaggaagaagcagaagaacagtgagtcggccccactccctgggtttccgctgcagtgtgctactcagctgtgtcgacccctttcttgggacctaggggtggaatgagatcacagtaggcgtctgttgtctgttccctttcctgggtgcagaaatgaaacagtgcctcaggggtttaactttatctgtttccatccctaaaatcgtgttagggctgctggtgaggacttgcttgtgccccagccacccgccactgcacctgaccagtattgttggctggtgcaatccagtggtgagctgacagtgagccccagcttttaggaaacagggctgtcctacatgtggatggctctgtgccgaaagcatgggaacagcccagcgataggtaaaatggagccatgatctcagaagacaggggaagctgtaaaaggccctgtacttgctttctgcagttaaacacagtgggaacattacttttgatgagattgtcaacattgcccggcagatgagacaccggtctttggctagagaactttctggtaagagcacgctattttccctgagtggtggctgccactttgctgttgaaggttcaagatttggattttcccatggatccatattttttccctgtgttcctgcaatggaaccctggaattctttcccctgtgactgaggccaccattcttactgtaggaactatcaaggagatcctgggtactgcacagtctgtgggctgcaatgtggatggccgccaccctcatgacatcatagatgacatcaacagtggtgcagtggagtgcccagctgtaagtgactgttatataagggggaagcagttaggctgggggaaagctggacttttgttgctttacttttggtgttttactggggcattgttaacttatattccctgttgtgattgacaatatttcttttcccacagagttaagaagcaacaagaaaatattccaataaaagactatctgataaccagtgaatgggcttggctgctttttggggccaggggagggttttgggaggttcagtatggctgtggtagcaggatctagaaagcactgattcaaagtcctggggtagtacagcctagaaggaaaggcacttctgtgggcgtggctgggaggttcagagctatgagtcttaagtcagatggatgatacactaaagcttgctctggatcctccccatcctggaggtacagtgggatctctggcatagcaattgcattaatccttaacattttccataagtctggggaatgtggttttggtagatatctacaattaacaaaagctactaagtacagcagggcatattgaaagagcagcgtaaacctggaccaatggcagtagcagtaacaacacaagggaaaataatgctttgtgacctttgcatttttccaataaaattgtatttagagaagcaaacccagtgcaattgttggggctgcagcagtgacttgagtgggacatcaaatggacctgaatttgattcccagcactcaaggtggttcacaaccattccagatgggtaataggcatggtcagcattaacctaagccacatcctgctcaccagtctagtctggtggctaggagggaggcgccaaggaggcctgtgctgtcttgtggggtccttttttcttttttgttttgttttgtagacagggtttctctagccctggttgttggttgtcctggaactcagtctgtagaccaggctggcttaaaggcatgcgccaccacccccggctttgtggagtcctctttaccataaagggaaactgaggttacagtccccaggtcgttgtgctgtgggtcagtgctaccaagatccaagcaatgtcaccatactgtgaagcacttggttgtatgtgatgctttctctgtaggtatgggtttctagaaaccaattctctggagaaaatgcaatatcagtaacaagccacagagcacacaagctctctcctggcacaggctatagttgtggccaccttggaggctgaggtagatcttaagtacaaggtcaccccaggagaaaccatttaaaatagaaccctggagatgtctcagtttttctgccagaggacctagtcaatttctgatccacaactccctggttcccaaggatttgctggcgtctttaagttgccttttgcagaggacctgagtgtttcccagcacccatgtcaagaggctatcacctgtaattccagcccttggggattttatggcttttctgctgtgggcactgcacacatgtgaccgtaacacatttttctaaaaaaaaaaaaaaaaaaaaagccaccgggcgtgaattaaagccacgcctttaattctagcactcgggaggcagaggcagcagatttctgagtttgaggctggcctggtctacaaaatgagttccaggacagccagggctatacagagaaaccctgtctcaaaaaaaaaacaaaaaaaaaaaccccacaacaacaaccccccccccccccagaaaaaaggtcacttaactaaaacagcataaggttaactcaagtagaaataacagctgcacagtggaacaaggcactaacctcagacttacctcattgagtccacttctctttttggcttcaaacaatatttggctgttttgtttctcgtgtagagggcccaggtttaattcccagtacccacatagggtggcttacattcacctgacctgtaacttcatttccagagaattcaatactttctggtctctgggcacctgtacacgtgatgcacatacttatattgagggcatgggggtgcatgcacatgtgaaatgtcttcacacaaaattttacatgtgaattgcagcagcactcataacctgtaaatggatacaacccaaaatgtctatccattgaggaataaacacaatgtgatgtgtatacatggggaagcatagatatatatgattaacatgaatggatcctccgtacaccggcaggctacacaaaaaggtcaggtattgaatgagtaaatctatgtaaaatgcccttggtaagttcagacagtggccctctggtccgcggaacttggcggtaaggtctggggagtgactaagagttaagtttttcttccaggtcatggaagtgctctagaattaaatagtggtgatgcttactcaactacatgaaaatattgtataacacaccgaatgtttttttttaaatgaaaagactactatgtgtaacagtctggatcaacgaggtaagaactggaccctggttttagcagacctgctgatgtgcaccgaaacccactgtacgtcatttgtgatgcaggaaggacattgacatttattctgttctgtgcctccacatgttatttcatttggccaccgttcatagagacacagagtagcgaagatcgattttctacagaggaaccctgggtaagaaacttgcttggccattcaattagaatgggtcaagggtctgggctttctgatagcacattcccctgtcctccacgaagtcacagtgctgccaggccgagtttgcaagtgccccgtgtttccaagcacccctagctgcttccagtgggcggaaggctaaagtcgcccatcttcctctcggcactgggtaacaggcagttaggtccgcagagaccactcgggccagaggtccccaaactcctcaggtcccacagctcttcgctcagaccgcttgtggaaagcgttgtgggcgggggctgctgcgcacatctggagaacaactgcacagctctccgccactcctcgcccgtcggcacacggagcacacgggccaccgtcgccagaagcttctggggacgtgtgggtcccacgacgggccacgatatgtgggcgcaacagaactgcgccacttccggtcacgcgcagtccgcacaccgtagccacttccgacatggctctgtagactggctcctctgcagtcttctcggtcgccaggaatgtgaccctcgttgcctcgtggtgtgtgacagaagcctccccaagccccaacccacgcagatcaccctgtttcaggcgcgccaggatccggatgtggcacctgggacagggtgggaccaggccgccaggaatgtcgggaaggctgctatgctggcagtggcggggatgtgtaaggatgtttcagtggactttctcagcgaacagatgacggtcctttccgctcacattgtaaattaacttcgcaatcaagtttgtggtggagcacggtcagggaaggtcaggaagaaagaactaccattagaggaaaaagctacttggacgtcaccgtagttggctgactgccttgttcagctggcaggatgcgctctggagcccgggcgatcttgttcatggctaaaggcctaataggcgctaactaaccgctgtaaggggcccctggtcgttggcaggtttcctgccttagtcctgtgatctcacttttggccgccgggaggtagcagagtgcttcaggggtcaggtgatgccattctgtatatggctacttaggggtgttagaccacttctgcgctttgcagaaatgaggacttgcccacgttattctggggattgtagtatggagtcaagctgtgtctgctgcacctctcctctgaggatggccatctgtccctcttcatgcgttgttcttacggtgctgacctgggcttctggggacagatgcaggactatcctctggctcttggctgtcagaatgaatactctgatgggaaggtcccagagactgaggagacctgagggaatacaaggatccacaaagcgctggcgtctagaagagggtggtgacagaaagtattacactgagcagcagggtggagggtgggacaggaggaaaggttttagatatttcaaacctcaggctaggtagtgtacatctagaatccctgcactgggagactaaggactgagagtcaaggccagcctggtttatagtgaagcccaccttgaaaacgtcccatttttgatgtattcctcgaatgtcacactggctttgcatgcagcttcctgtcaccccccaccagcagctgctggggaccccacccttactctgccaccctcagttccaagcactttacatacatcagcaccatgtgtttaaggatgaaagctggcctggacaggtttagtgatggtccgggtcacacaggctgtgagcagtgactgcacttgaatttgaaccaagcataccgacttacccctttttccatgctgtctggctcctgcccccagacgacagggcatatggcttgaagacacagtgacatattgcctacatgtttagtcacctctggtggcctatgggcctaacttctgcctgcctcctggtatttcactggcccattgacaaggctggacggtagccagtctacagtcttcctttgcgaggaccgttctgtgacagaaaatgggtggcttgaggggacagtggtgcgggcaggccacttgcctcaatggcttccctagtcatagtcccatctgtacctgtctggggtccttgctgctgagccctgagaactgccttggtcatggaggaaggcccttctcagtcccagcctgatgtagcttctcaggaggggtgggttgctccgtgtgcacctcagcaaccacactgtaagctttcgctctgtgaagctttgctcagacatctagtcgtgtgtccatgcttcctccacgcttcagtcctgtcattgtctctttgcttctccatccttctctactaacaccatctccccctttatctccatctattatcagtctctcctgttttcattttatctatcttcccatgatacctgaattctcaataagcaggagactgaaagcaacctaagtatgtgagatactgaattaagctctatatttaatatagtgttgacctaagtaccgatagagctatagaatggaataattttatatccagcaaatatctgagtgtcagtggctgccaggtaccatgtcagcatggtaattacaggtactgatgatggactaaacttacacacttagctccatttcttcccttccaaatcccactgaagtggcatcggtagtgtataattagaaacaaagctatagtgcatggtgggggggtgcctgtagggttgggagatgtatgccaggaactatcgtgtagccagtggttctccagccttcagcatgagcacggacaaagcacgccagatatgtgagctatatcaactgcttgagatcaactcatcagatgagaaatcagaacatagatgacggctttcagaaagttaaaacctaaagcttgctttatttataacgaagtaaacatgaagtacgggggccctccagagctctgctgtgggataggaaacacaacttcacaagttgaagcagcttctaaaataaacttagcgcgtggcccagcagctccactccacagagaagatttgtctgcaaaaatgtagcactggggctccacccccagcctaataatagccccaaactggaactagctcactgtccagtgacagtctatgcagaaatacgggaaatgaactgctgattcgcccagccacatggaagagtccaaaaggtaccgtgcttcattagcgaagccaggcacagaggctgcagactgtgtggttacatctttctaagagttctacagaaagtggaacagagagcacagggcgctggcttccagagctacagatgcagggaggtgacccaggaggtacacagggatgtgaacaggcgatgatggaaacagtatgctggtggctgtgacttcggtttgctgtgagccattacttattgtcggattctgtctatataaataatcaacctgattttcaaatggtggaaaaatccgaaaagatatccattcccttaaacagtataggatgctataaaggcaaagtaaggaaaaataagggctgggaagatggctcagtcagtaaaatgcttgctctgcaagcccagggacctgagttcggatccccaggatccacacactatggtcacggtcggcagcagcactgccatctcctgtgtcttatgcttgcctttggactgctgtcacactgccagcacttccaggacactaccttgctgactcactctcaagatcttaggccttctcagccccttccaacaacactgcacatcctctgtttccctgtaagttttgtttctctggagaacccgccgcaaccagaagacctgggccacccaacagttcaccaagcctaagtgagacagaggaatatgtcaccccaccaaagccaactctgattctgttcaaggagccttcactaggagtgttcccataatccttggtaaattaattgctttatatcatgactggcaaagcaaaatattttcaggagataaagtgaaaaaacaaatgcagagcaaaaccacaaaaaagggtcagtgagagtgggtgtgggactgcacatctgctactgcactcctgggacttcactcctgggactgcacacttgggactgtacacctgggactgcacacttgggactgcactcctgggactgcacacctgggactgcacacctgggacttcactcctgggactgcacacctggaactgcacacctgggacttcactcctgggactgcacacctgggacttcatttctgggactgcagcactcagtggtaggatcactatgtttcaagccagtctgagctacacattgagttgtaagtcagcctgggctgctacagagcaagaacgtgtttaagtgtctttcctgccccccaaaagaatcttaagtgaaaacttgagaggaaaagcatcaaaccaggagaacaggggccactagacagtctggactgtagggagaacggtgacctcacagtatagcagggtaaatcaagaggttatgagatggactagagagtgagaccccccatcccgcccccttcacaaacaaaaatagatttacaagtgaattcttccttgcggaagaccagaattcttttccagcccctaaatcagggcagcttacaaccgcctgtaccgctagaggagcaactgcttctggactccgtgggtatctataattcccctccaacccccctctctctctctctctctcacacacacacacacacacacacacacacacacacacacttaaatcctaaaaaaaaaaaaaaaggtggagagcaattgggggatacactatatcaacatctggtgtccacacacatgcacccacacatacaaatgtatgcattatccccccccacacacaaaagtaaaaagcagaaaataaaaatggcagccaatggctgggggacacagcgtggtgccgggagtgtttggctagttagcacacgctgggctctgagcccagttgccagtgatgggaagaaaaacacagcaggagaccaagcacatgggagtggcagtaagagaacgcctttcccggctttgcggacagtcatctccctcacacctggactgagacaccgctacaatcctgaccggtgattgttctgtgaagatttcagcaaatttatttatttatttatttatttatttatttatttaatatgcgtacgctgtagctgtcttcagacactcggtttcagcaaattaattaattaattagttaattaattattatatgtgcatacgctgtagctgtcttcagacactccagaagagggcatcagatttttgttacggatggttgtgagctaccatgtggttgctgggatttgaactcaggccctttggaagagcagttggtgctcttaaccgctgagctatctctccagtcctggtttcagcaaattaaatgggcttccaggagcaagaaatagttggattaatcaaacaatttgataattgaaaacctgggaccacagcttttcaagttggtcagcaagaacaggatgacacttagggacccaaggcaggaggattgcagttgttcccaggccagcctgggacacataatacattttaggctatcctgggttacattgtgagtcactatctttttttttttggctttccgagacagggtttctctgtagccctggctgtcctggaactcactttgtagaccaggctggcctcgaactcagaaacccgcctgcctctgcttcccgagtgctgggattaaaggcatacgccaccacgcctggcttttgagtcactatcttaaaaagaataaaaaagggggctggagagatggctcagaggttaagagcactaactgttcttccagaggtcctgagttcaattcccagcaaccatctgtaatgggattcgatgccctcttctggagtgtctgaagacagttacaatgtactcatcacatatataaaataaataaataaaatctttaaaaaaaaaagaataaaaaataagataaaatcagctaagcatggtggcatatacaatctcagcaggtggatctctgagttccaggccagcttagtaaattctacatagtgaattctacatagtgaactccaggacagctagggctacacagcgagactctgtctcaaaacaaccccacaccctcacaagacctcaagtggattccaccaacagctaacagtgtggtgagagctgtttgataggatggtgagagtcacaatgtttcttaagggaaaaatagtctaatcttatggatcagtacagccaagccaagcctgctgcattcaatgactgacagtggagagtgggcctcggggcagccttgtgatggagccacagtgtcacttgggtaactttacctctggaaaggggcagcttttctgtgcaagtaaggcacccagccgatgactgcctgcagaacgcatcatgtttacgtatctgtgctccaatttactccgctgagtgtgtactgccccatgaaacaagggacctgcaaaagacttctggctccactgaagttgaacagtaagaggctttttatttcctgaaactcaacaagatatggtggctaatgacccaggacacggagcccaggaaagagccagaaagaacctgtaagtgatgggtaagctggctggccccagggtgaccccggagagtctctgcgcagctctgaggagggcttggttggcaagaacattctctcttctacctgggctcacctgaccttgtttctgagcccatatggctaagtccctttctgatctcccagtcaagtgaggtacaggcggctgcttaggaccgggcaccccagccaggaaacgggagccaggagccctcaggtcccttcagctgcctcagtcttaagaaggagacacctgggtcaggtgaggatgcacagctcctcagatgtcctgtgtgtgaagcaggctgcagagaccgcactcagagtctggtgggcctcacggtgggaatctgggttgagatctgggcaaagagggccctgaggtgaggagtcagggggcctccaggctcaaactgaggtgtggcttagttacaggccactccactccttctgaaacccaaaggcagctcagctcggggctcccaggcacagaaagggtctgtcatcgtccctcgaaatgggctgtgacttgttccagagtcctgcctttagtctcagggacaacggtcagtgtgaataggacactgagagcgcagaaggcagcggtgagccagaaggcaccgtagggtctgagcatctcctgcagagagagcaaaggcatgtgaggcagcagaggacagactgactgaagcctgccctgacaggcctgtcacgtctctgcagacccaggtatgtagggaatagctcaccaccacccatggcaatgtgtgcctgggaaagcgaggctcatgggaatgttgtgactgccctgagatcagcagtgtcaagggacagctaggtgcctgttcctggccggctcaggcttgccgccattaatcttctcccttagcccctgcgcctttggctctgccttccagtgtcccatgctatgagttctctgtgtgatgacgaaggggggaagtgtcactcttgagagagggtagggtagtggggaggtagttagtctgtgaccctgcaaagtccccattcctcagttcgctgcgggagaggttactaggtgacccttccattctcagcctcttagacagggtgctggcctgggtcactgatgggtttgtctgtctcctcctttctatgcttctttccccaggtcctttgctgtctgtcccctctcacgtgccatgatgggtctctgtttgccttcctctgggcaccctgtccgcctgagtacatctctggctagctggatagacatgccacctactgccttcttggcacctgtcatgagatggaccctgatcaactcagttgctaccatctctgaagccttgaataggcctgggcatgg

SEQ ID NO: 1199 - DNA, 935 bp, Mus musculus
ctcggaggaggcaacggtgcaactttcttcggtcgtcccgaatccgggttcatccgacaccagccgcctccaccatgccgcccaagttcgaccccaacgaggtcaaagtcgtgtacctgaggtgcaccggaggcgaggtcggcgccacatccgccttggccccgaagatcggtcctctgggtctgtctccgaagaaagttggcgatgacattgccaaggctaccggtgactggaagggtctcagaattacagtgaaactgaccatccagaacagacaggcccagttaaacacagtgggaacattacttttgatgagattgtcaacattgcccggcagatgagacaccggtctttggctagagaactttctggaactatcaaggagatcctgggtactgcacagtctgtgggctgcaatgtggatggccgccaccctcatgacatcatagatgacatcaacagtggtgcagtggagtgcccagctagttaagaagcaacaagaaaatattccaataaaagactatctgataaccagtgaatgggcttggctgctttttggggccaggggagggttttgggaggttcagtatggctgtggtagcaggatctagaaagcactgattcaaagtcctggggtagtacagcctagaaggaaaggcacttctgtgggcgtggctgggaggttcagagctatgagtcttaagtcagatggatgatacactaaagcttgctctggatcctccccatcctggaggtacagtgggatctctggcatagcaattgcattaatccttaacattttccataagtctggggaatgtggttttggtagatatctacaattaacaaaagctactaagtacagcagggcatattgaaagagcagcgtaaacctggaccaatggcagtagcagtaacaacacaagggaaaataa

SEQ ID NO: 1200 - protein, 86 aa, Mus musculus
MPPKFDPNEVKVVYLRCTGGEVGATSAPKIGPLGLSPKKVGDDIAKATGDWKGLRITVKLTIQNRQAQLNTVGTLLLMRLSTLPGR

SEQ ID NO: 1201 - DNA, 1143 bp, Mus musculus
ttttcggctttcggctcggaggaggcaacggtgcaactttcttcggtcgtcccgaatccgggttcatccgacaccagccgcctccaccatgccgcccaagttcgaccccaacgaggtcaaagtcggtgcgtgccctcgccgcgcccgggtgctgtcccggggcctggcgggtctcccttgggccttggctgccacgtgtgtaagaggggagggagcccgacgctctggcggcccgtgcgccttaggtgtacctgaggtgcaccggaggcgaggtcggcgccacatccgccttggccccgaagatcggtcctctgggtctgtctccgaagaaagttggcgatgacattgccaaggctaccggtgactggaagggtctcagaattacagtgaaactgaccatccagaacagacaggcccagatcgaggtggtgccttctgcctcagccctgatcatcaaagccctcaaggagccaccgagagacaggaagaagcagaagaacattaaacacagtgggaacattacttttgatgagattgtcaacattgcccggcagatgagacaccggtctttggctagagaactttctggaactatcaaggagatcctgggtactgcacagtctgtgggctgcaatgtggatggccgccaccctcatgacatcatagatgacatcaacagtggtgcagtggagtgcccagctagttaagaagcaacaagaaaatattccaataaaagactatctgataaccagtgaatgggcttggctgctttttggggccaggggagggttttgggaggttcagtatggctgtggtagcaggatctagaaagcactgattcaaagtcctggggtagtacagcctagaaggaaaggcacttctgtgggcgtggctgggaggttcagagctatgagtcttaagtcagatggatgatacactaaagcttgctctggatcctccccatcctggaggtacagtgggatctctggcatagcaattgcattaatccttaacattttccataagtctggggaatgtggttttggtagatatctacaattaacaaaagctactaagtacagcagggcatattgaaagagcagcgtaaacctggaccaatggcagtagcagtaacaacacaag

SEQ ID NO: 1202 - protein, 82 aa, Mus musculus
MPPKFDPNEVKVGACPRRARVLSRGLAGLPWAATCVRGEGARRSGGPCALGVPEVHRRRGRRHIRLGPEDRSSGSVSEESWR

SEQ ID NO: 1203 - DNA, 910 bp, Mus musculus
gcaacggtgcaactttcttcggtcgtcccgaatccgggttcatccgacaccagccgcctccaccatgccgcccaagttcgaccccaacgaggtcaaagtcgtgtacctgaggtgcaccggaggcgaggtcggcgccacatccgccttggccccgaagatcggtcctctgggtctgatcgaggtggtgccttctgcctcagccctgatcatcaaagccctcaaggagccaccgagagacaggaagaagcagaagaacattaaacacagtgggaacattacttttgatgagattgtcaacattgcccggcagatgagacaccggtctttggctagagaactttctggaactatcaaggagatcctgggtactgcacagtctgtgggctgcaatgtggatggccgccaccctcatgacatcatagatgacatcaacagtggtgcagtggagtgcccagctagttaagaagcaacaagaaaatattccaataaaagactatctgataaccagtgaatgggcttggctgctttttggggccaggggagggttttgggaggttcagtatggctgtggtagcaggatctagaaagcactgattcaaagtcctggggtagtacagcctagaaggaaaggcacttctgtgggcgtggctgggaggttcagagctatgagtcttaagtcagatggatgatacactaaagcttgctctggatcctccccatcctggaggtacagtgggatctctggcatagcaattgcattaatccttaacattttccataagtctggggaatgtggttttggtagatatctacaattaacaaaagctactaagtacagcagggcatattgaaagagcagcgtaaacctggaccaatggcagtagcagtaacaacacaagggaaaataatg

SEQ ID NO: 1204 - protein, 130 aa, Mus musculus
MPPKFDPNEVKVVYLRCTGGEVGATSAPKIGPLGLIEVVPSASALIIKALKEPPRDRKKQKNIKHSGNITFDEIVNIARQMRHRSLARELSGTIKEILGTAQSVGCNVDGRHPHDIIDDINSGAVECPAS

SEQ ID NO: 1205 - DNA, 1023 bp, Mus musculus
tcggctcggaggaggcaacggtgcaactttcttcggtcgtcccgaatccgggttcatccgacaccagccgcctccaccatgccgcccaagttcgaccccaacgaggtcaaagtcgtgtacctgaggtgcaccggaggcgaggtcggcgccacatccgccttggccccgaagatcggtcctctgggtctgtctccgaagaaagttggcgatgacattgccaaggctaccggtgactggaagggtctcagaattacagtgaaactgaccatccagaacagacaggcccagatcgaggtggtgccttctgcctcagccctgatcatcaaagccctcaaggagccaccgagagacaggaagaagcagaagaacattaaacacagtgggaacattacttttgatgagattgtcaacattgcccggcagatgagacaccggtctttggctagagaactttctggaactatcaaggagatcctgggtactgcacagtctgtgggctgcaatgtggatggccgccaccctcatgacatcatagatgacatcaacagtggtgcagtggagtgcccagctagttaagaagcaacaagaaaatattccaataaaagactatctgataaccagtgaatgggcttggctgctttttggggccaggggagggttttgggaggttcagtatggctgtggtagcaggatctagaaagcactgattcaaagtcctggggtagtacagcctagaaggaaaggcacttctgtgggcgtggctgggaggttcagagctatgagtcttaagtcagatggatgatacactaaagcttgctctggatcctccccatcctggaggtacagtgggatctctggcatagcaattgcattaatccttaacattttccataagtctggggaatgtggttttggtagatatctacaattaacaaaagctactaagtacagcagggcatattgaaagagcagcgtaaacctggaccaatggcagtagcagtaacaacacaagggaaaataatg

SEQ ID NO: 1206 - protein, 163 aa, Mus musculus
MPPKFDPNEVKVVYLRCTGGEVGATSAPKIGPLGLSPKKVGDDIAKATGDWKGLRITVKLTIQNRQAQIEVVPSASALIIKALKEPPRDRKKQKNIKHSGNITFDEIVNIARQMRHRSLARELSGTIKEILGTAQSVGCNVDGRHPHDIIDDINSGAVECPAS

SEQ ID NO: 1207 - DNA, 23900 bp, Homo sapiens
tgacccagcaggggtcagtccatttacagcgacccccggagactggctgccctcctgctcaatggctcccgggcggggcagcctgtggatcccggccaggatggcccagagctgatggagggtcacacggacacggcttcttggtccctacctttaacattgagagtctggagctgggtcaggttcccaatggaacgtgggagctgcatcagttgattcctttccacgtttaagacctaagaaagaggaagaggcagccaggcgcagtggcttatgcctgtaatcccagcactttgggaggccgaggcaggtggatcacaaggtcaagagttcaagaccagcctggccaacatagtgaaatcccatctctactaaaaatacaaaaattagctgggcatggtggcacacacctgtagtcccagctactcgggaggctgaggcaggagaattgcttgaacccaggaggcagaggttgcggtgagctgagattgcaccattgcactccggcctgggcaacagagtgagactccgtctcaaaaaaaaaaaaaaaaaaaaaaaaaaaaagaaagaaacaggaagaggtgacacgagaacccacacacagaccacagtgatgacccccgcacccctcgccctgccgggccagggcacccaggcactacacacacaagctcttatctccccctaccggcccttgaggaagacagaaattcttgtttccgctggagacaggaaaaaaactgaagctcagggtggcaaagtcacgtgctcaggagagcacagccaggccttgaaccccttctggctgaggttccagcacttacaccgaccacaaaatgctcagtaactgccccaccatcagggaaggagggagaaggggactacagacttggggatctggggaggcagcacaggaggctctagttcccctggccttaaggaaaaggctgccctaaggccgtgtgatccacccaaggcctcaggccggcagtggtgctgggactgaaccagggcttgttggattccgaagctgtgctccctccagaaggtggtacctcgaggtgagcaaggccagcaggatgacacactaaccattaaaaatagatgcaatgggggccaggcacggtggctaacacctgtaatcccagcactttgggaggctgaggtgggtggatcatgagatcaggagattgagaccatcctggtgaacatggtgaaaccccgtctctactaaaatataaaaaattagccaggcatagtggtgggcgcctgtaattccagctacttaggaggctgaggcaggggaatcgcttgaacccgggaggtggagattgcagtgagccgagatcacaccactgcactccagcctggtgatagagcgagactctatctcaaaaatacaaacaaacaaaaaatgatgcaatggaaagctaagtagccattaaaaataataagatgaatatttgatgaaccaaaggatgctatgagttattgtcaggtatccaaaagttacaaattagtgaatgcagcaattctataaaaatacacctactggccaggtgcagtggctcatgcctgtaattccagcactttgggaggccaagacgggtggatcacctgaggccaggagtttgaggtcagcctggccaacatggtgaaaacaagtctctactgaaaatacaaaaattgtccaggtgtggtggcgtgtgcctgtaatcccagatactcaggaggctgaggcatgagaatctcttgaacccgggaggcagatgttgcagtgagttgagatggtgccactgcactccagcctgggtgacaagagtgagaaaaaaaaaatacacatacaaaaagtcctacaccaaggtatttattgtggctcaaagtggtacaattggtcaggcgtggtggctcacacctgtaatcccagcactttgggaggccaaagtgagtggataacttgaggtcaggagtttgagaccagtcaggccaacaaggcgaaacaccatctctactaaaaatacaaaaactagctgggagtggtggcacacacctgtaatcccagctactagggaggctgaggcaggagaatcgcttgaactcgggaggcagaggttgcctctgcaactctgatggcgccactgcaccccagcctgggcaatgcagtgaggcactgcctcaaaaaaaaaaaaaaaaaccccaaagggccaaggggagggtggagctggcactgattgcagcctgcttccactggctggagcccggccagaacattccaggcttgagtgactgcctggtctcactaaggccatccgaggtgggtttctgtttctgcagccttacctggagggcagtcagctgccccagatcgtcaggaagggctgtcagctgattatcgtggagatctagaacctgcagaagaaagacccctgtgagtctccaagtgagaaagtccctcagactccgggctccagagcgctgaggaggggctggggccacctcacacccccagtgcagaaacagagtgcctgccactcctttcccactcagtgttgatcattcccgcctcattttccttctcaaaccattataccattttcttattttatgtatatttatttttactgttaactgaaaaactatgctataaaacagtatgcctagatactaatatgttaaaaagaaacactccattgtataaatatgtaagactttcaaatatgcgataaaatattgacagtggtactccacagtgtaaaattatagatgtttccccctttgcttaactgtacttgctaatttttaatttaattttattttattttgttttattttgagacagagtctcactctgtcacccaggctggagtgcagtggcacgacctcagctcactgcaacctccacctcctgggttcaagtgattctcgtgcctcagcctcccaagtagctgggattacaagcacaagccaacatgctctgctggtgtttttttttgttttgttttgttttgttttgttttgtttttgagacggagtctcgctctgtcgcccacgccggactgcggactgcagtggcgcaatctcggctcactgcaagctccgcttcccgggttcacgccattctcctgcctcagcctcccgagtagctgggactacaggcgcccgccaccgcgcccggctaattttttgtatttttagtagagacggggtttcaccatgttggccaggctggtcttgaactcctgacctcaagtgacccacccgccttggcctcccaaagtgctaggattatgggtgtgagccaccacgactgactgctaattttttaaaaatgaaaatgcacaaaaaaggccttggagaaatatttatacatgtgcacacacaggtaccctccatatctatggattcaaccaaactcaggtgcaaaatattaaaaaaaaaaaaaagaaagaaagcatctgtagtgaacacatacaggcttttctcttgtcattattccctaaacaatatagtataacagattgggcctgtgctgctgggctgacacctgtgctgccggcctcctctgaaggtgcatatcactctcccaagctcaggtctgcgcataacaaccctgggctcacacctcccacatgttgtgaatgcctcccagcccatccggggaggagctcacagtcagcagggagtccttccagatcacctgcgcgtccctcctcttccttcttgcctgggaccatcagtctcctcgccctctgctagctgactcgccatgaggctgtcacttggctttcctcctggcatgtaaactccccagggacagggcctgtggctggtcatctttgtcaccctaacccacacacagcccacagaagtatccagtaaaccatactgatcaaatcccagactgactggtagattgggcccctctgacatgcaagaggcagcccaaaaggagcaggcgctcagctgccgcgtggaaccccatgcagagccccagctgcctgggaggagggcccagtaccttgatggttgccagactcaggaggctgcaggatttgggaagcagggaagtgaggtgattcgtgtggacgatcagcacctgtgtggagagatgtgcggccatgctgggctgaggaagagcagcaggcagggcaggctaagggcgtgggagccagcccagcgccgtgccacgccccaccatcttgctctcccagacaccaccacggggatgcgggtcagtatcatgaactctcccaatggggaatctaatgcccttccttaaaaactggatcttcaagggtgaaagagaccttagaggtctacatcttccttccatctgagaagggatccccctgcagccatcctgatcataaccttcccagcaccagcgtcttcacgtggaaaatagagaataataaagtgcttgcctcccagggctgccatgatgttaaataaaagctcatgcgcaaaacttccagggctggcagaggggccagggctcagtccaggtcatctactgctatttttccttttctttttttttttttttgagaccaactcttgctctgtcgcccaagctggagtgcagtggtgtgatctcagctcactgcaacctccgcctcccaggttcaagcaattctcctgtctcgccctcccgagtagctgggactacaggcgcatgccaccacacccagctgattttttttttatttttggtagagaccgggtttcaccatggtagccaggatggtcttgatctcctgacctcgtgatctgcccacctcggcctcccgaagtgctgggattacaggcatgagccaccgcacccggccaatctactgcatttttcttaggcattgactgcggcccaacacttccagcacagactgggcgtggtggctcacacctgtaatcccagcactttggcaggctaaggcaggtggatcacttgaggtcaggagttcgagaccagcctggccaacatggcaaaacctcatctctaaaaatacaaaaattagttgggcatggtggtgggcgcctataatcccagctactcaggaggctgaggcaggagaattgcttgaacccaggaggcggaggtttcagtgagctgagattgcaccactgcactccagcctgggtgacagagcagagcgtccgtcttcaaaaaaaaaaaaaaacaaacaaaacttccagcgccaaggagctcactactctgttggcagggaacacttttttttttttttttttttgcatattctcatttagatacttcacttagagcgcttctacccatctgcattcaaagctgcaatgctctgctgaaaaatcattcactcccctctgaatctcccctgggtgaccagaataaaaggcgtgagtttctattattactaacaccggggttcataagcctttactacgtggtaggcatgtacactcagtatatttctatctctatctagctatctaccactcatttaattctcacaatacctcaggaaggagaactatgaatgtcttcatttcacaggggaagaaactgagaagtaagagtttaaggaagttgcccaagtcatgaagccagtgagggcagagttagaatgtgacacaggaaggtccaaccccaaagcctactctcctatctgtgaaaacacctgctgcaggccaagagcataagaagcagagagaaaggaggtgtctacgccgggaagacagctcctcaaagtcccttgtgggttcaaacaagcagacatgcaacaagaaagtctctgaagatgaagctccatcttaccttcttctgcagaactttgcatgttgcaaaagctccaaatggaatctaagataagataaagaagagtaagtgtctcccctcctgccagtttttagcttgttctctgagtggcattcacgtgaggaagagacaggcaggaggtgaacaagggcaaaacgccacagcaggtggcagtgctgagcccaggggcaaggctggcaagcagtggtgttggggatgtggccagcccttccctcggtcagctggcaggagactgccctgccccacccaccctgtccccattgtgaaccccttcaggggctggagaatgccaggcccttccagcaatgtaggagtctatgggtacattttctacctagactccttgactcttggagactacgttatattgaggccaaaggatcatcttcaattattttggacgagaacaaaatctaaggaaacatctcgtgactagagcttctggcctttctaaagccccagtccacctctgtctttcctagggacacaagatccaagaaaacgggacagatccaattcacagcccaacactatcctcagtttacctctgagagctcacatttagagatgtcgagaatgtcatctgccccagcttcttttgcctaaggataaaaagaatttttaaaaagtattaagacaaaacacctttgcagagtggacaagccaggcaaagaacataaatgtaagcagctgcaaaggaccatagacactatctggttccactggtccatttggcaggtgaaccaatgacccctgctttcccagagcttgaggcccagagggatgaggaactgaaaagcaatgacagtgcgctcagtctacaggggagaagcacccttggcagggggcctcatctgttgggtctaagtcaaatatttcttctgtgggtgggggaggcagatgggaaggagcacggcttgttgggggcagtgcggaggcctactccatggggaccgaggaggagatgggatagagttagaggaaacccactttccctcaccaaacacatctggtactccaggcgtttccgagcctcctcactgggtttccgcttccggaagaagagcggcatccttcccttttcccagagcgatctttaggaccctggggcacaggagagaagttagggactggggaatttgtcacagcccccaacacccgggacaggtagtgcagtaacacagagcatgcagctggtctgctggaccatgagttccatggaggcaggggctgtgtctccctagtgagttccacggaggcagcggctgggtctttctagagagttccatggaggcagcaactttctagtgagttccatgggggcagaggctgcatctttttagtgagttccacgggggcagaggctgcgactttccagtgagttccacggggtcagggacagcgtctttctagtgagtttcacggaggcaggggctgcgtctttctagtgagttccacgggggcaggggctgcgtctttctagtgagttccacgggggcaggggctgcgtctttctagtgagttccacgggggcaggggctgcgtctttctattgagttccatggaggcaggggctgtgtctttctagtgagttccatggggtaagggtcagtgtctttctagcgagttccatggagccagggactgcgtcttcctagtttcatggagttccatgggggcaggggccacatctttctagtgagttccatggggtcaggggccacatctttctagtgaattccatgaggtgaggggctgcgtctttctagttcttccatctgtgtcctgagcccacagcaggcactcagtactccttgttctttgttgactaaacattgagcagcaggatgaggtggagacagacaagccagatgacctgggttggggcccatatttgccaccgacccatagtgaggccttggcattatccttttcctgttctagggaaacttagagacgtttcctcaggtgctttccaaggctgttctttgaggactctaacagactctgccaatgaatcacttctagccccccaaacgctgtcagagcaggatcagcaggagcaatccagagccagccaggacctcagggagctcaactacatcatgaccaaagagacctctgcggtgaatacaaattaaaaagcaattctcagcttaccaccctcgttattattccattttgttctcaccataaccctttttaaagtgaagaaacacgccgggtgtggtggctcatgcctgtaatcccagcactttgggaggccaagacaggtgggtcacttgagcccaggagttcgagaccagcctgggtaacatggtcaaaccccgtctctactaaaaatacacaaagaagctgggcgtggtgatatgcgcctgtagtcccagccacttggaaggctgaggaacgagaattgcttgaacccaggaggcagaggttgcagtgagccaagatcatgccactgcactccagcctgggtgacagagggagtctctgtctcagaaaataataataaataaataaataaagtgaagaagtagatgcttattaagttcagtggcctggctgtacagcctggattgcagcctggaaccgtggtctctcaagtcctgacctatgggatttgcccgactgcttggtgctcacataacttggcacacacgaagtacactgtcctgaactcagagccaggtgctcactgcctgcccagggcctgcacagtgtctgtaaataccagagctggataagggatggcaatgagccaggaggcaatcacccagggaagtgcatggtgagcagcacaggctttgggatgaaaagagaactgggtttgaatccgaaatctgccacccacaactgcagaggtcaccttggttcacctctcagagcctcagtttcctcatctgtaaagtgtgagtaaccatgctaccaacactggcttctatgaggatccagcgacttcatgtatgtcaagcccctagtacagtacctggcacatgagcgctcaataaatgttagccacaaagcaacccacatgcaagcaacattgattcagggcccgctagaggagctagggagaagatagtcatgggaggagatgcagttgaagaagacatacacccagtcctcagagggatgggcaaagatggcagctctgcacccacgggggcggggctgtctggggaggcagccaggcctgcagagccagttcaggccctcttgtcaccccacctgcctgcaaggatggggaatggtttgaaaacagccctcccccatccgtccctgatgaccagcacttacccttctgctccccaatcactaaccctcttgcacccccttcctgatgtgcagccctccccacttcctcccaaccaccatcgctctcccacccctccccgaagatcagttctttccaggctgccccacatgcctgtccctccctctccgacgtccagcctagatgcggggggagggccacacccatatttcctggggtggggtgggcagtggctgacctggctttgcggatggagggatcccccacgttgggacccgcgggtgcacccgagggcaggccgatcactcggagggcttggtcacggactcggggccgcagaccacccggcacgggccgggcggagccggagtctggtctccttcaaaggcaggtgctgggaacagaaactcagaatctcataaagtcacgcagaccgggatgacgaagtctgaggctctaggaatcgcggactctccgaatgaagagcgggactggatttccacatagactgttttgataactaaagtgcacacaacaagtgctcgagggagcaggggtcgccgcggtactggggtctcggaatgggactacggacccctcaggggaggggcggggctctgggattgggtgacggggaccggggtgacactcacgataaaggaatatgggaaacagctagggctgggatcaccggagccacccttctcagacttctccggagcgaactacccgaaccccctttcggaatctctagcttcagcgcaccgcggtgccctgcttgccagccgtcagcctcaggcgcctgcccacaacaaacatggcgacaagggcgtctctggaaggccgggcagtgacgacagttctcgcgatagccgcgttttcctgcctatatctggcttgtccgcgcgatttccggcctctcggctttcggctcggaggaggccaaggtgcaacttccttcggtcgtcccgaatccgggttcatccgacaccagccgcctccaccatgccgccgaagttcgaccccaacgagatcaaagtcggtgcgtgctctggttgtggccggggctgcgggatggagcatccctcggccccgccgcgcgtgcaaagctttccccgtatggggctcttaaagccgctgcctcccagagaccttcccggtgttgcgccgccccggccaggcctcagcctttctgggccttagcttcttcacgtgtaggtggggagggaggactggaccacctgtggcggcttgggagcccgcacgccctagggtaaggcttgtctccgggcgtttcgccccactggcctgggttagcgggcgacggggctctctccacgcctccccggtgtgagtttcggagctgcccacacccgagggaggagcgggtggcccgcctcgcgctctgtgctgtttcgagaagaggcagagggtggcgtgtccaaccccggaaagacgctgagagggctgtggctcggggctccctctgcagagacactaactcttcttttcccccagtatacctgaggtgcaccggaggtgaagtcggtgccacttctgccctggcccccaagatcggccccctgggtctggtacgttatcccctccaaggggcatttttttcacatttgtttcactttaagcgccggctcgtggagtcacgcctgtgccagaggtgccctcgtggcttggactgtcaccctcagtaggcctgagccactgaactagtactaggtaccttaggaaggtcgtgtgtgaaaaatcgaacctggtgcctttaaattgtaattagctccatgtgtctccactgctgctttagtgtacctgaggggtgggcccaagggggagttttgaagttaggactggcttagagacattgggcagccaacatctgtatttcctcgtcaggaagtgggcatggcgttgttgggagattaaacggggtgtgggtgaagatccagtgagcgtttccagctgtgttgtagatgtaaacctagcagttaatgtggcaggctgtgtctcatgcctgctgagcaactgctggcttccccgtcattctgtcctcttggatttctctgaatttcattaggcctttatttaatccttgcacagtgctcccctgccccaaatgctcttccccattggtcttttttaacctgtatcttaactattcttccttggccgttagctggcacttaagggacacttagcctcctgttgaggctaaggattactagaggaggagaacttcagagtagcaaataatcagacctccatccaggaagatggacgtgggtggtctgacatgggagcctagtattttgaaagctccttaggtgattctaatgtcagcagggctgaaaatccccctccttaagcacatgggcacttaggagggggtctaggttacattgtggccaagtctgcagtttacagttctggacaagaaccccaacccccaatttatgctatggtgatagctgtgctctgattgagaaggtgcccttaggtacttgagatagcttcctttgttgccaagtgagaagtggtgggcaggtttcaaggctgtggttcacctctggacaccatgttgattacatgcctttatttctagtctccaaaaaaagttggtgatgacattgccaaggcaacgggtgactggaagggcctgaggattacagtgaaactgaccattcagaacagacaggcccaggtatttgcttgtgcttggtttcgggagaggagggtggggggacaggtagcaaccctctgggattcctgaagagtatttctgccaccagtggtgagccgagagtgatttcaccttgttggggaggctttgtcaagagtacggacctagggcaaagacttggacagtgtgtggccatgatttttgagagccagcgtgcatggcagtattcactggaggtggagtattcactcaggaatctcttctgcagattgaggtggtgccttctgcctctgccctgatcatcaaagccctcaaggaaccaccaagagacagaaagaaacagaaaaacagtaagttgtcttttccctagtttggttttggtaatggtttgtgagatgtttgatatatgtggctgtgttttcccttaaaggaaacctggggttgacatgggtattgggtgttgatatggttagggctgctagagccaggtagtatgaaaaagtgccacgtatgctgggtggctcacacctgtaatcccagcactgggaggctgaggcgggtggatcagttgagatcaggagttcgagaccagcctggccaacatggtgaaaccccatctccaccaaaaaatacaaaattagcctggtggtgctcgcctgtagacctggctactcagacggctgaggcaggagaatcactcgaacccaggaggtggaggttgtagcagtgagccaagattgtgccactgcactccagcctgggtaacagtgagactccgtctcaaaaaaaaaaaaaaaagtgccatgtagtccctgtgtggggcaggccccaatcagtgcatgtgggaggaagatgtcagcaataatgacctataatcaggagaccacatacaggtggcaggtactgggcagtttaactccctggcaatttaagcttgtcatttctctaaaacagtttctgccatgtcagatttgtgaaggcttggttttgccctcagccacccgccactgcacctgaccaggtctctgttggctggtgcaatccagtggtgagctgatagtaaaccccagcttaggaaacagggttgttcttcatgtggatgactctgtgccgaaagcatgggaacagcctagaaatgaaatgaaggacacatgatctgctttggcttcagactttaaaagagcttttgctgtttcctcttctgcagttaaacacagtgggaatatcacttttgatgagattgtcaacattgctcgacagatgcggcaccgatccttagccagagaactctctggtaagagcaggacaacatgtaaccgccataactgtagttgtgtttttcactgagtgataacattcttcttacttgaagggtgctcagtgagacccaagatggggtgcagttttctgggactgaaaggatggatcgtaaattggatgtgtttaatctgggcatcaaggacccatggaagctttgcattccgggttatggaactagatggaactctatattctatattaggggagcaggaacctcattccttccattgcctgctatgaaccccttcagtattccccagtatctgcagattgtgagggactgagccagcacctccaatgccaccatttctttacttaaaggaaccattaaagagatcctggggactgcccagtcagtgggctgtaatgttgatggccgccatcctcatgacatcatcgatgacatcaacagtggtgctgtggaatgcccagccgtaagtgacattttcattgttacagtaggggtgaaaggggggccacccagtgtattcacagagataagctgggaagttttggaaatggttactggtggggtgggataatccttttaaactttttactgattttttttttctttcccacagagttaagcacaaaggaaaacatttcaataaaggatcatttgacaactggtggattttctggtgtggcgtcttccttgagggagctagctcctttgtggggtggtcagtggggtcagggtggcagaacctgtggagaagtaacaagcaccttgtggtgggtaacaaaactgccctgtatgggctgggctgagctcagaaaggaagcctttctttcctttttttttttttgagacagagtttcgctcgttgcccaggctggagtgcaatggtgcaatctcggctcaccacaacctctgccttctagattcaagcaattctccagcctcagcctcctaagtagctgggattacaggcacgtgctaaaagacagggtttctccatgttggtcaggtcaactcctgacctcttgatacgcctgcctttggcctcccaaagtgttgggattataggcatgagccaccatgcctggccaggaagcactttttgtagactatcatgaagcctttcctaagaaatgctctaacaaaaccggaacacatggggagtgtagctctccatccccgaccaactgaagttatgagtgggttgggggcccaggatccattttgctagccattccagtgcacagccagggctcagaaccactgacctgaccactctccgagtcctggactaattctttggtcctgtgaaagtgaggttcacatcatctgttgaagtaactataaactgttactccaacctttcctctgaactcatgtggcttaaagtattttctgctgtctcacgtttctcaagtctcatcttcccacagttctgttccttctgatgaactttatagagcctgtgttcatcactcccttttgttttgcgatgaaccctaaagcactcctgagcagcttgaagcaccacctgggagaggattctgggtactggagtaaagggagttggaagttgtagcccagagaaattgatttcccctatatgactcatttctttgcacattagtttttgccagtgtctctagatcagtgcttttatgtcacctcaggttggagaactgccttaagtggaaaagactgactacctggacctcctgagttagggataggattctatttcagatacagtggcttgtgcctcaatcccagcactttgggaggctgtggcaggagcattccttgaggtcaggaattaagaccagcctgggcaacatagccagacacttttctccaaaaaactagctgggtatggtggtgtgtgtgcctggctacttaggatgctgaggtaggagggtgcaggagtggagacttcagcaagctatgattgtaccactgcactccagcctaggtgacgagagtgaggggctggcacaaaagcattccagtgtcctagaagggactaccaagtcaccaaggaaacagacagtaagcaggccaaaggcaaaaatctggatctataatacaaggggaacacaactgttctccatgagggagaagggagaatgaggagcctggggcagtttatgacacctgcctctgagtccagcatggctgtcacacacctccccattctcggggcttcctattctccatggaaaaggatgtgcctcttggttcattagcagcaagctctaccctcaacaccagtagcctctttttttgttgagatgtgtgtgctctttttttgttgagatggagtctcgctcttgcccaggctggagtgcagtgttgcaatcttggcccactgcaacctctgcctcctgggttcaagtgattctcctgcttcagcctcctgagtagctgggattataggcacatgccaccataccgggcaagtttttgtatttttagtagagatggggtttcaccatgttggtcaggctggtctcaaactcctgaccttgtgatctgcctgggtgggctcttaacagcaacaaactctacaaagactggccctgggtgtgcttttctcagttttggaacatcaaggaatgttccccacctcaaggagattgtggtatttcataggtggctctagaatcccttttctcacttgtatttacacctcctgctgccccaaatttgatggtttttcaatcatttctggccaatgcgctgagttctttcacaacatttctcattacttccaggagaaactgccagcattgcccaaagacttggctttgatgtaggagccaagttcttttactcattgatttggtcacttactctgaataaactcaggtttctggattgcttaccaaataaagtgctttggcccactacctgaataaaggcaaacctgcaattgagtggagccctgatcttttgatggagagctgagcgtccatatacagcatgtgaaatagtggctgtttattgaaggtgttttgcatgtggctctgggctgcagactctaagttagatgtcttcagatgctttcaagcctttagcatttctcagatcctcacccacctgtcctgagtcggcatgtccgggactctctccacttctaccatgttcctagttactctccggcgtggagtctctgatgtctaacgaaggcagagctgcaccggaaggccttcccacactcgctgcattcgtagggtttcacgcctgtgtggattctctgatgctgactaagggatgagctctggttaaacgctttaccacactcattacactcataaggtttttctccggtgtggattatatgatgccgaatgagggctgagctctcactgaagaatttcccacattcattacatttatatggcttctccccggtgtgggtcttttggtggattatgagattggtactctggctgaaggccttcccacactcgctgcacttgtagggtttctccccagtgtgagtcctctgatggtttgtgaggtttgcactctggctgaaggccttcccacacgcggcacatctgtagggcttctccccggtgtgaatcctctggtgctgaatgaacgctgcgcagtaactgaaggccttcccacactcgctgcacttgtagggcttctccccggtgtgagtcctctgatggttcgtgaggtttgcactgtgacggaaggccttcccacagtcgctgcattcgtagggcttctctccggtatgaattctctgatgctgaacaagagctgagcagtcactgaaggctttctcacactcgctgcatctgtagggcttctctccggtgtgggttcgctggtgtttggtgaggttggcgttctggctgaaggctcttccacattcactgcacttgtaaggcttctctccagtgtgaatcctctggtgctgaatgagagatgagctctggctgaaggccttcccacattcactgcactcatagggcttctctccagtgtggctcttctgatgctgagaaagggaagaacagtaactgaaggctttgccacattcattacatgcatatggttttgctctgtgaggtttcaggatttccgagttcttgaagctctcggtgtgtgtctcacatttgcgaggtctcgcttccacgggcactctctgttgcggagagaggactggtctcagattgaagctcttctcaaggtcactggtcccgtggtctgaatccccagggggcatctctacacatgggtcttggaatgaagcttcagaaagggcttgctctggtggtgatccagatataatcttccagcctgaaaaaaaaatgaaaagctgttgtgttcccttggtggaaggaataccaaaggctgaaggagtctggccaagctcttacacacacaggtttgatgactcatctcctttttttttttttttttttttttgagacggagtctcgctctgtcgcccaggctggagtgcagtggcacgatctcagctcactgcaacctccgcctcctgggttcacgccattctcctgcctcagcctcccgagtagctgggactacagtctcctgccaccaggcccagctaattttttgtatttttagtagagacggggtttcaccgtgttagccaggatagtctcgatttcctgacctcgtgatccacccgcctcggcctcccaaagtactgggattacaggcgtgagccaccgcgcccagccacctcctttcataagggtgtaatggagcctactacctactgaattcaaagccatcgtaatgtcatagtgcaacacattactcacgtttgtggtgatgctggtgtaaataaacttactgcgctgccagtcatatgaaagtacagcacataatacttaataaacaactatgttaccagattatatatttactatacttaatatatatttttaattgagacagagtctcactcaggctggagggcggtggcacagtcacagctcactgcagcctcaacctcctgggctcaagcaatcctgccacctcagcctcctgaatagctggaactaaaggagcataccaccatgcctgggtaattttgatattttggagaggctggtctcgaactcctggactcaagcgaccctcctgcctcagcctcccaaagtgctggggattataggtgtgagccaccacacccagcctatactatgcttttaatagttattttacactgtactccttccactacaacaaagttatctgtaaaacagcctcaggcgggtccttcaggaggttttccagaaggcattgttatcttagagatgacagcttcgtgcttgttattgcccctgaagatcttccagttggacaagatgtggaggtggagacagtgatacgcatgatcctgttaggtctaggctaatgtgtgagtttcttagtttttaacaagagtttaaaaagtaaaaaatagtgccacacacacacacacacacagattttgagacaggatctcactgtcacccaggctgaagcatggtggcacgatcatggctcactgcagcctcgacctcctgggctcaattgatcctcccacctcagcctctgagcagctgggactacaggcccatgctaccacatccagctaatttttgtattttttgctgagatagggttttgccaagttgcctgggctggtctcaaactcctgggctcaagggatcctccgcctcagcctcccaaagaaaaatgtgtaaagtaaacgtagtgtagcctaagtgcacagtgtttctaaagtctatgtacagcaatgccctcggccttcacatccatctaccacttacccactcacccagagtcctgcacgctccactcatggtaagtgccctatacaggtgtaccattttttatcttttatactgtatttttaccataccttttcttttcttttttttttttttgagatggagtttcactcttgttgcccaggctggagtgcaatggtgcgatcttggctcactgcaaccttcgcctcctgagttcaagcaattctcctgcctcagcctcccaagtggctgggattacaggtgcccgccaccatgcctggctaatttttgtatttttggtaaagacagggtttcaccatgttggccaggctgatcttaaactcctgacctcaggtgatccactcacctcggcctcccaaagtgctggaaatacaggcatgagctagcacacccggcctaatatggagcttcgctcttgctgcccaggctggagtgcaatagtgtgatctcagctcactgcaacctccacctcctgggttcaagcaattttcctgcctcagcctcccaagtagctaggattacaggcatgcgccaccacacccggctaattttgtattttttttttttttttgagacggagtctcactctgtcacccaggctggagtgcagtggcacaatctcggctcactgcaagctctgcctcccgggttcatgccattctcctgcctcagcctcccaagtagctgggattacaggctcccgccaccacgcccggctaattttttggatttttagtagagacagggttttaccgtgttagccaggatggtctcgatcttctgaccttgtgatctgcctgcctcggcctcccaaagtgctgggattacaggcatgagccaccgcacccagccaattttgtatttttagtagagatggggtttcaacatgttggtcaggctggtctcgaactcctgacctcaggtgattcacctacctcagactcccaaagtgctcggattacaggtgtgagccaccacgcccaactgtttccttgaatttctatacacagtcttcaaccagactggctgggttcaaatctgggctccacctcttacgtgctctgtgactttgggaaaattgtgtaatcttttgaaaccttggatttatcacctgtgaaagcagctccctcacagaatcactgtgaggattaaatgagttaagacacataaaggacccagaatggtagttgagacacagtaagtgctatctgcatggttcttgttattctgtaccttctccttataaaccatcctaaagcattaagtaggcttccctcagaactgcaagtgcacaccaatgcccccagtccaccaagagcacagaggccccactgcaggctgagagcgtctctgtgtaacttggggtccgatcatctatgggtttgacagtttttaaaagcagaccatctatttgagtaaaaaaaaatcaaaaggagaggaagagtgacaagaagccatgggaagaaggggcaattcagaggaccacatgatgctcacaaatggcctgtccctcagctcacctctctcgagtgctggctccagtagaagactgtctgatgacatctcaggcctgacacaccccaaacagagctactgatctcccttttaacccagcgcctttgttaatcttcctacttacccaactgttcaggccaaaacctagggtcatccttaatgccacctcccctacatctcacatccaatccaccagcaagtcctgttggctttaacaccaaaatatgtcctgacccctctcttacaggccaccatcacctcacattcccatgtctgcaagagccgcctcctaactgacctccccgctcccatgcctgagcctcgaatgtccattcttcacacataacgctgaattctttttcatttttttcaccagtgtcacttgccaaatgctgaactcttttcaaacataaatctcatcccttccctgcatcaaaactctttaatggcttattttcttaggtgactaaaacccaaacgccttaccatggctccagtggccccacacaatctgtcccctgcacaccactcttcctcgtgtttactaagctctggccacacaggtcttctaatccttaagcaagctcattcccacattaaggtctcaacatacgctgtggcccagaatgttcctctcctaggtctcctccaaacagctggctcatccccttccttcagatctcagctcccatgtcacctccaaagagtctttcctcttcatcagctcccaaacagctccctcccttctattcccgactcagccttgtgccccagtcactaatcccttgcgcagctttattttcttcacacaactcatcaccataaaaagtagattagtgggccgggcgcggtggctcatgcctgtaatcccagcactttgggaggccgaggcaggcagatcacgaggtcaggagatcgagaccatcctggctaacacggtgaaaccccgtctctactaaaaatccaaaaaattagccgggcgtggtggtgggtgcctgtagtcccagctactcgggaggctggggcaggagaatggcatgaacccgggaggtggagcttgcagtgaactgagatcgcgccactgcactccagcctgggagacagaatgagactccgtctcaagaaaaaaaaagtagattagttattgtttgctcagtttatgtccttcacgaagatgtaagcagaaactacgtcttcatccccactcaacaaagggaatacatattacccatggcagctaaaatgatgccaggtatgtaccaaatgcttaaggcacatttgctgattgatgaatgattcaatgaatcagaatgagtagaactggccagcagggtctgcgaaagtgttaacacccaccacagaagtccctaaagtgagcagcagggagaatggcactttcaactcctgggtctgtcacttgggaggggtagggtagaataacccagggcccaaacccagccctcagaggcacagtgatgcccaggacatgctgtgagttagaacagaggccatgttgaactcctctaatagctagagtggaaacttgcccctgacgacttctgttcactatcatatagcttatataactctacagttgacaatttttttcagatatatgttaattggtgaaataagaaagattttatcatctacatttttcatatatggaaacatgactacataattcagtggtgtgcctggaatccatgtagttaatgcatggcaagcagggattatgtgtctttcatattcaccgagatatgagatatacgtgtatatgtgtgtgtgtgcgcgttgtgtgtgtgtgtgtgtgtgtgtgtatttcacccacagttcctggctcataactcccatagccactgctacagtctttctttttctttttttttgtgacagagtctcgcttagtcgcccaggctggagtgcagtggcacgatcttggctcatggcagtctctgcctcccgggttcaagcgattctcgtgcctcagcctccctagtagctgggactatagatatgtgctaccatgcccagctaatttttgtatttttagtacagatggggtttccctatgttggccaggctggtctcaaaactcctgacctcgggtgatctgcccaactcggcctcccaaagtgctaggattacaagcgtgagccactgcgcccagccattgctacagtcttttgttaaaacgtaagagcactttaggcctcagaaacagaatctctctctctgacctccccctgcccttctttcacctgcccgagcaggactctaatgtgattgtgggccttacgacccccatttcagagaagatcctgccccataccctggaggaaggaatgctgcacagaggccaggaagaatccgcacggacaggctctgccaggtgtcctcactcagtctacagtgttcagtcagaccctttctgtccaatctcatctcaacatgctgtccgtgtttcaatcacgcctatccaatgaatcaaaggcccaggagggcagggtttagagagcttccagagagctgaacacatggaggctcctgcagggcggcggcccagggaaggcatgaaagctccctgcaccttccccacccctcgtcccatgcatctcttcatcttcatcttttctaaaataagtgcttccccaagttctgtgtcctttctctaataaattaatgtaatccaaaggggggtcgtgggaaccccaatctgaagccagtgtagttctggaggcctggacttgcgactggtgggaaggggcagggggtgccttgtgggactgagccctcaactagtgggatctgatgctatctccaggtagacggtgtctgcttgcttggtgtgtgggggaaaacctcagtcctctctgctggcagaagcctcctatgttgactcctgctgtgcgtaagggcagaggttgtggttttccgctcaggggcacccacaccaagagctgcttctactgccctacactgctgcctcagagcaccttcttggtggaaatgcccctttccaactcctgtttctaacgatgtggtgattttaacctttggggccactgtactggggtgaacagtgcccccacatcatgtcaacctcaaaatacagaatgtgtctgtgcttggaaacaaggtctttgtagatgtaatcaagctaaaatgaggccacactggattggggtattttaatgccctaaaaagaaggaaatccagacacagatcgagaatgccacatgctgacagggacagagattggcgtgatgcagctaaaagccaacaaatgccgaagattgcgggcaaccaccggaaactagaaagaggcaaggaagatccttcccagagcctgcagagggagcccaggcctgctgacacctcagtttcagacctctagcctccagaactgtgagcgaatcaactgctattgttttagtccacccagtttgtggttatttcttatgagagccccaaaaaactaatacagc

SEQ ID NO: 1208 - DNA, 702 bp, Homo sapiens
tccggcctctcggctttcggctcggaggaggccaaggtgcaacttccttcggtcgtcccgaatccgggttcatccgacaccagccgcctccaccatgccgccgaagttcgaccccaacgagatcaaagtcgtatacctgaggtgcaccggaggtgaagtcggtgccacttctgccctggcccccaagatcggccccctgggtctgattgaggtggtgccttctgcctctgccctgatcatcaaagccctcaaggaaccaccaagagacagaaagaaacagaaaaacattaaacacagtgggaatatcacttttgatgagattgtcaacattgctcgacagatgcggcaccgatccttagccagagaactctctggaaccattaaagagatcctggggactgcccagtcagtgggctgtaatgttgatggccgccatcctcatgacatcatcgatgacatcaacagtggtgctgtggaatgcccagccagttaagcacaaaggaaaacatttcaataaaggatcatttgacaactggtggattttctggtgtggcgtcttccttgagggagctagctcctttgtggggtggtcagtggggtcagggtggcagaacctgtggagaagtaacaagcaccttgtggtgggtaacaaaactgccctgtatgggctgggctgagctcagaaaggaagcctttctttcc

SEQ ID NO: 1209 - protein, 130 aa, Homo sapiens
MPPKFDPNEIKVVYLRCTGGEVGATSAPKIGPLGLIEVVPSASALIIKALKEPPRDRKKQKNIKHSGNITFDEIVNIARQMRHRSLARELSGTIKEILGTAQSVGCNVDGRHPHDIIDDINSGAVECPAS

SEQ ID NO: 1210 - DNA, 793 bp, Homo sapiens
tccggcctctcggctttcggctcggaggaggccaaggtgcaacttccttcggtcgtcccgaatccgggttcatccgacaccagccgcctccaccatgccgccgaagttcgaccccaacgagatcaaagtcgtatacctgaggtgcaccggaggtgaagtcggtgccacttctgccctggcccccaagatcggccccctgggtctgtctccaaaaaaagttggtgatgacattgccaaggcaacgggtgactggaagggcctgaggattacagtgaaactgaccattcagaacagacaggcccagattgaggtggtgccttctgcctctgccctgatcatcaaagccctcaaggaaccaccaagagacagaaagaaacattaaacacagtgggaatatcacttttgatgagattgtcaacattgctcgacagatgcggcaccgatccttagccagagaactctctggaaccattaaagagatcctggggactgcccagtcagtgggctgtaatgttgatggccgccatcctcatgacatcatcgatgacatcaacagtggtgctgtggaatgcccagccagttaagcacaaaggaaaacatttcaataaaggatcatttgacaactggtggattttctggtgtggcgtcttccttgagggagctagctcctttgtggggtggtcagtggggtcagggtggcagaacctgtggagaagtaacaagcaccttgtggtgggtaacaaaactgccctgtatgggctgggctgagctcagaaaggaagcctttctttcc

SEQ ID NO: 1211 - protein, 93 aa, Homo sapiens
MPPKFDPNEIKVVYLRCTGGEVGATSAPKIGPLGLSPKKVGDDIAKATGDWKGLRITVKLTIQNRQAQIEVVPSASALIIKALKEPPRDRKKH

SEQ ID NO: 1212 - DNA, 801 bp, Homo sapiens
tccggcctctcggctttcggctcggaggaggccaaggtgcaacttccttcggtcgtcccgaatccgggttcatccgacaccagccgcctccaccatgccgccgaagttcgaccccaacgagatcaaagtcgtatacctgaggtgcaccggaggtgaagtcggtgccacttctgccctggcccccaagatcggccccctgggtctgtctccaaaaaaagttggtgatgacattgccaaggcaacgggtgactggaagggcctgaggattacagtgaaactgaccattcagaacagacaggcccagattgaggtggtgccttctgcctctgccctgatcatcaaagccctcaaggaaccaccaagagacagaaagaaacagaaaaacattaaacacagtgggaatatcacttttgatgagattgtcaacattgctcgacagatgcggcaccgatccttagccagagaactctctggaaccattaaagagatcctggggactgcccagtcagtgggctgtaatgttgatggccgccatcctcatgacatcatcgatgacatcaacagtggtgctgtggaatgcccagccagttaagcacaaaggaaaacatttcaataaaggatcatttgacaactggtggattttctggtgtggcgtcttccttgagggagctagctcctttgtggggtggtcagtggggtcagggtggcagaacctgtggagaagtaacaagcaccttgtggtgggtaacaaaactgccctgtatgggctgggctgagctcagaaaggaagcctttctttcc

SEQ ID NO: 1213 - protein, 163 aa, Homo sapiens
MPPKFDPNEIKVVYLRCTGGEVGATSAPKIGPLGLSPKKVGDDIAKATGDWKGLRITVKLTIQNRQAQIEVVPSASALIIKALKEPPRDRKKQKNIKHSGNITFDEIVNIARQMRHRSLARELSGTIKEILGTAQSVGCNVDGRHPHDIIDDINSGAVECPAS

SEQ ID NO: 1214 - DNA, 161428 bp, Mus musculus
  misc_feature (1)...(161428): n = A, C, G or T/U
accccaactagatactgatcaggacagaatgttcaaaattagatactgatcaagacagaatagtcacttaagtagagagacacatgattcttttttaaaatcatctttgtgtgtgatagtggggtgagggttacatgtgcggggaggccagaggacaacttgtaggagttggttttctccctccaccatgtaggtcccagggatcaaactcaggccatcagacttagtggcaagtacctttatttacagagccattttcttagcccatacatgaacttgttttaagtttttttgttttgttttgtttttaagtgtgtgtgtgtgggggggggggtaggcaggcttatgcacatgactgcaggtaactctttgaggctggagttacaggtggttgtgagccacccaactcaggtgctgggaaccaaacttgagtcctttgtaagagcaatcttaaccactgagccattttttctgctctttaacatgagttctttttgttttgttttgtttgtttgtttttttcgagacagggtttctctgtatagccctggctgtcctggaactcactttgtagaccaggctggcctcgaactcagaaatccgcctgcctctgcctccccagtgctgggattaaaggcgtgtgccactacgcctggcgtaacatgagttcttaatgggcccaataagcctgaggagtttgtgaaaatgcagcttccaggactccatccccagatttcactgaggcagaatccctaagaaagggactctggaacctgtgtacttagtaagcacatttggggtgttctatgcttgctgaaattagagacccacagttctagatgcttttagaaaagttttacatgtcaacaacataaactttaccaacgtagccagtgttaacagatcagagccggcgtagtcacactgttttgcagctaatctgtagagcttttctcgcagtgtgtgtctgtgtacatcagcatgtgtgtggaagccagaggtcagccttgggtgctgttcttcagagccacccaccttggggtttggaggcaggttttctcattggtctgggtctatgatagttaggctagcatggccagatggtccagaaagtctcctgtctctgtctcctcagtactgggacaacagtgtgtgttaccatttcttggtttttatttatatatttacttatataaaaatataactttattgtattgtgcgtgtatgaatgttttgcttgcatgtatgtcaatgtgctgtgtgcatccccagaggatggaacccacaacatgccctggaactggggttgcagatgactgtgagctactgaacccagctcctttggagaagcacctgctacaaccaggtgacctcagacagggaggactctgcacctctttcccagtggctccatgctcactctggaccctcccaagaactagcattgttctgcagacaaggaagagacaaaaggcacagccattaaaaaggtgtgccctttacagctgagccatctccccagcgacaccactcacctctgtctggctttttgactgggctctggggactaaaatgaggtcctcttgtgttttcaaagctgaatcatctctccagccctaatctcccgaccctttttagcttgcaaagttgaaatcgttaaacaagtccctttcttagggcccctgacaacctccattcaattttctgtctccctgggtgtggccttgctgggagtctgatggagatggagtcctaggatgtgtagctttttctgactggcttaagtttacttagcacagtaccctcacagtactggcttaagtttacttagcacagtaccctcacagttcatcgtgttatggatgggtccgggctgaatgatgcacgattggacgtattgactgtatttcacttacccattcagcatattttggccattgaattaggctgttctgacaattctttgttcagttctttgggagtatatagttaggaatgggtcatatgtggggacgttatttttaatcctcaggggaattagcatacttttcccccataaagcgatggctgctttgtacactcccaccgataacatcaaagcttctgatttctccacatcctcccaacgtttgttaccctctgggtacttgcttttcttcctggaggtatccagcaggatgggtgtaagacacttcactgtggtctgggctttaactggcatttcccagggagttcctagttgaacatcttctgtgctgcacgtggtccccgcatctctcagccttggagaaatgcttgttcaagtaatttagccactataaatgagtaagttgactcttgcttagctctttatagatttggatataactcctcatcacatactgtgagcagatatggttggcaaataactcccttcattcttcaagttgcctttttactctacagagtgtgttctctgatacaactttagatgttttatgcaccttgtaatcccatagagaaaatataccgaatcctcccacttctgttggtgaaaactcaggcctgtgttgattgatttgtgtcgagccacacagctgtgagtgtctgagcttcgattggtcttctggtctgactccatcctatgccctgctggccatccctacactaggaacctaggaagcctggggaggcttgatggaggccatgtaggcgggagaaacatagaactgaagtcttggtaccctgctttggaccaagcatatacccattcccctatgcacacttgcttagcctgagggataggcggcagtgccgtgttttaaaaatggagtttagttggatttgttttggcatttcataaacttgtttcatagcccatctgttgcttgctgtgcccccagaagcccatgcttgttcataccactgtgccaccatccccacctctgtctctagggaggccagttctttcctctgaaggaggtgtctcctcatttgtagccccttgccttggggatattccctgtagcctggattcacacctttctgctgctactagcactggggagcttctcttggtctgcattgcattattcagtctcagctcagacccagaacctgggtaagggctgctgtttgtagagggacaagctcctcaggacattctccttgcagccaacggggacactctgagccccttccaggccctcgtacatcaccactgcatcaacatccagactttgccagagacaaagtcacagagactttgcagagctcctccccttcacacatggggacttctggagttcagtttgtccttctaggacttcaatgaccctgccgggggtcccatggaaaggggccaggtaggcttgctatcactgttgcttctgtagtgtgatgcagtctccttaacctactgaaatttgggcagtatttgagagggcaagaacttcattcactctttattcctacatagaccatgcattgagcaccgactctcagcatggtgcacatagcatgtctttgaacaacgtgagggaagcgtataccctgagtagcaaggctgtgtctacactcatccttgttcatgcttgtgtatgtgggcatatgtgtatgctaagacctacgctattagagctctgggtgatggcatttgtctgcatgggcagttggagaaggcttgggaaattttgagaagcgcctggcatgttgaatggtgggggtaggtgtctatggaagacaagctggtactcatggctgacctgtgatcaggaggcaaaggatagggaactcgttctgagattcttctcaatggaaggtcaccttcaagttcatttcatttcattcattcaccgtttgcttatcaaacatataataaagaccaacctctgggttcttgaattgcatgtaaggaccagcagttttagcctcagcagagaccctctgcagcttcttgggcgccttgccccagtccctggcagctccaggagtctgatgctaatatggggctcagggctgttggttttagcagcttccaggagacactccaggatcccaagtgcaggagaacattcctctcttcctggctgtccacaggtgcctggccctgttcgggagggagtgtgtgagggtgtgttgaggtgagccaagttggcggtgccagtgggatatgcggggaaagtcagccagcaaaataccgggcacacccctgagttttaggagagaactggaagggccttgtggggtctgtcagctgtcagatgggctgattggattgatgggtctactagagaaacaagatgggaaagccaaaaaggatatggaatgtgggagcccatcagcctgacaccgaggtgacagcatttgtactctgacactggccaccagggcaatgtatgacttaattatcctatagcacgaagcataaaaggacctcctgctcttgtgacctcctgggatggttttgttttctggccattttccttctgtcaggttcctccagtgtggtagaccaggttagacctgataggaatgggcaggctcaatccttatttgctgcaatcataaataaggcagaatgaggttcacctgtgttctggtggctctctaccttccggctgtgttctagggcttgcacagatctgggttccttcgggcagctttgggcagtgctggaagctccatcctacgtttgctttctgagagagtctgccctgtgtgcctcatgggacgtatgtatggtcctcaaatgattaatctaagtgagaaaggtctgattagattgggtgcaattgtgtaccagacccttccattaggaaaaacccagacctttactgggggaaagggaagtgcattgttcgtttcccagctggaaaattctgtgacctaggagagcttagaaaaatgttgctatcattccctggtatcaggacagccctcccaatagttagtggcctgctgctacctgcctattctatggcgattgccccagggatttgacttctgatgggtcaccaccaacttagctatgcacacacccaggtgcaggtgaaccaggccctctcttgaggttctacagcagaggccttccagctgtgcactctctgattgctggctgcacacacagccctgggtgtttcccggcacctggtctcagcttgaagcctccaagtgaggtaggttctatacctctgtgttctgtgcagtgtggcatgttgaagataatggctgtgccttttgtctcttccttgtctgcagaacaatgctagttcttgggagggtccagagtgagcatggagccactgggaaagaggtgcagagtcctccctgtctgaggtcacctggctggagcagcagctttcctggggagagagtctgcctctgtggcctcggagtgggaaatgtctccctttcctttcctgccccacaagcagcagggtatgggcagtttgtgtctttggtgccctttgagcttggaccccaagcagactggacacagatcatccttctgtggggacttaatgaagccactggtttcgttatttcaattacagtcgtccagtttaacctgaagtcccctcccactttggtactttgaaatgactcttttcagaagacatgtgatcactccattagccctggtgggcaggtgctggcattgcttctgagccagccttgcccatactctctgcagggaggctggggtggcagggagaccaggccttctctgaaggcagcagctagaagggcctctgtggagggactgcatgttgttagctgggttttgatttcagtaccggagttgataaaacgagataaaccccaggctcactaaggctgtggaaattaaacagagatgatatcaaagttcccccgagtcttcagctgtgctgcagtagcttcgccctctccgcggctggggcccgaggcagcctttgattctgaaacaatgagcagcgtcagttaagcccagaactgctgactttagtgcacggtcgtggtaattctttgatcagctacaagggagcagtgtgctgtctgcccgccacactgtgaaggggcttcatagttaaactgtgaagttcacttctctgtgaacctgggatgacagtgttgttgaggcgctgtgctatagggaaccaggcctcctcctggccagtcctccattgcaaatgcgtgcagtgtggtgtggaggggaaaagaccccctcccttggaagaccaaactcacaccttggttcgaagtgcatggcccacactcttgcttgactctcttatcttgaggaaagatccctcagagagacacagaccagatgcctggagcagggctctgcagccctcagcctgggaatgatctggtagaggccacatgcccactcaggaaaggtcactggggactgacatctggaaggctaccaaaagagaacagctcaaggtcactgtcaccatggccaagagcagatgtgactcccaagagcccagtaccttccttccttgcctggccagtgttgagaatccactggtttcagagtggctcagtatctgccatccagtcacccaaatagggactctactctggctttccctgagacacttcctgtggccacagctggatggcacagtgttgcctctctgctcccttcctttaggccggttggccccgctgcttgtgcgtggtaatggagcccctgtgtgctgtggatcctgcacacgctaggccatagatcaacccattcccccctgtgccgagctcagatctccctcattaggcctgaatttacctctgtcctacacaaacatggccttagctcatttttattgttgtaaattatttatgagggaaatgttgaatctcaaaagtgaggtgtgagggaaattaatcccaggttacttttatctttctgtatgcttctcccctttgctttacttagtgagctatggccagaggaaaaaaacgctctggcattttaaaatataattagtgttgagcctgcttttgcatttgagcaggatgctggtccccatgtgcagtggacagtgcacagactagactgtggagcatcctctgcctgctgtcagccaccagctgctgggggtctggaccaaacctcagtttctgcttatgtaaaaataaggctagcttgagggaccctccagctctgaggcgagtatcggctgataaggaacctggaaaagcccagtggatgtgcagagttctgtacaaacgtggccgcggagccactatgatggaaccaggagttgttgctggaaggccctttgtgtcttatacagagtcacctcctgcctgctggtcaatgtctgtcacttgctcccttaccctccccttctagccctctgttgggctcatattcgcggcccctcttcttccaggcagaggcctggctcaggaccctgggctgcagggtccccgttgtgctccctgccttcccttccggctggaggctccaggcagcctgaggaaacacggagtgcaagttaataaatggccttttgttaggaaggtcaattgaagtgactgtagagacgctgttaaaagtaatttgcagtcagaaaatatgtaattcagggcaagccactttgagcgatggcctctgccatggatatcttgggcgtttctcattaagaggctccttggctggtggcggccatgccccaccgccaagtgggccgaagcccctggaacagccatttgtctcggaggcacaaagactgccttgatccccagggcacagcaacctggcaaccaagggagagaggcggggcgagcttggagacgactgtgcgggctgagccagacctgcagtgggctgggcgagctgggctcctgagctctgagaccaggctctttgtctgtttccgctggaggctgcccgcacgcagccatcttggaagctgcagctggatggctcccggggtgcattatgggagcagtagctcccctttgcaagcgtactcaccctcttgcaatcgacagcaagaaagagagtcgttgtcattatgcctcatggagtgcattgccattggggagcatggatctcccagcaaatgcgatatttcctctgtgtgtgctcacaatctcgctcttttctgactccctccatcccttctcttttccttcatttctttttcttctctttattccctgtccctctttctctttcatagtaaaggcagtaggattttaaaatatatatatttttttttcttcacacgttctttattaaattcacagcatgatatttaacactggcaggattcgtacattttgctaatgagttgttaattgcaaaacatctttggtaacagacatcaggtaccaatatttttgcaaactgcagccctgtgatttttatctgccccaccccccaccccttacaggatttttcagggacagaggcattttgtttagagattggctcagaattgggcaggtgcagctatttaaccctaaacccatattggggtcacaggtgtggagtcacctgataaatatttactcagtacctactgggtgctagagcactaagcactgagccgccctagctagataaaagctgcctagaaaatgaaaattcaggagaggagaaagaggtgcagaccggtctccacctcttgcccccgacctgcgaggtgccaggcactgccaagtcctaaccagcaccacgtctgtttccagtgtactctgtaggttccgctgactaaacaggagacctgcatgcagcgatttgatggttcctgtgaggtgggctacagacagcctgagtggccagcgctttttggtatgagtctgaggaactcgaatgtgcctcccgctgcctcttcaggcaggatgtttgttttagaagctgtagctttgagagggcagcagccagtagggcttaattgctgtggagcaaggtgggacttatttcgttcttccccaccgcttgcccagtaacagtgctccatatcaggtgcggagggttttatttggattctggtgcacagccactcaggtggccaggcgttcagtacagctttccgtacttcatcagcctcctccgctggtcctgggcagaggcagcgagcagcaaaaggttaattccacgcatgtcttttcatccaagtgaccagtgagaattaggatcacagtgcttagctttgagtaagtgccgcttgacctggaggttaaactagacaaagaagagggccagacctctagtgcatggtgcctcccttctggccagctcaagccagaatgcctttaagaacccacaggcccttaagccttccagtccaccttctgttttctgagtgcctactgtgtgcttttctgggcccctcttttatattctctgttttcacaacagcccctgtgtggatcaagacctcattttacagtcgagagaaagctggggccccccaaagtttactttcttgttcagacactgtcttataggtgtggagcctagagccgcacacacctcctctgcctatgcccagatgcgctctctggttttggagctcattgaattctctgtctgcagaaggtttagctgtggttcggaagcctagctccacacaggagcactgtgtgaggtacatacagactttgccaggggtgtccaatgttagtccctggtcagaaatgaggcagttgggagtagagttaagaagaatgtggggctgggcaggtagctcagtgggtaacatgcttgtctaacctgcatacagggttccatccctagcaccacataaagctaggcatacacacttgtgagcactcaggagggaagaagaggaaggaagacaggagtttgagaccagcctggaatatatgataatgtgcttttgtgtttgagtggaaattacgtcctgatatgagccctcagcattccacactaacagcttgaggtgcggtggttgaattcttggtctgggttcagggtcagataaggccaggtaaggaatgtagagctcactgaggctggctgccccaggattctcagtctacttgaaaccttgctcactcatgtaaacactgggtctgaattgtttgctctccacttccttttccaaaccaggaccaagccaccatgcccgaagtcaaggagctttcagaagccttgccagagacaccgatggaccccatcacgggagttggggtggtggcttcccggaaccgagcaccaacaggctacgacgtggtaagacacaatgcccacttgtctgttctgatctgtctactttggtccctgtgtggaaactatgcatcttccctctcagaacttaggatgaccagaagaggaaaatcatggccaaggagtggttaggagtgggagtcggaacctgctgaggccatggcgcggggggatgatttcctggctctggctggcacaggcttttgacatctgtgatggtcatgtttcacctgtaattagattcattgatttccaaagtcacctccagttttgactctccatgaagaggatttagggaagatcctgggagttgtcttgcattgtcccaggagtataagtgttctgagtgtggtgttcttgcccatagccagcagggaacttgtagagtgattagcttagtgtgtgttgtggacaggaactttaagtctgggcttctcaaagtcagggccaataatcaggaacttctttgtcatgggaccatcatgtgcatcattagctgtgtgcagcagcatccgtggcctctgcttggctgagatgaagacgttccgagatgttccctgagatgcttgtgaagagatggagaggatccttctccacgaagatttgcagctggtcggcctcctgtcttcaaagcccagtcgggacgtctaactttccataaaatagaatcattaggtatggctttgtgccataaaactcttggggaagctaataaaaatgctcctgatttgagaaactgaagtgtgttttgatgaattgggtctgaggtggcactctgtgcatcaggcctgcctgcgagcccctgctctgcagtggaccgtccagggtccctgaaggctcggactgggcttgggcctctctcatggcttcctgctgttctctgtccatcagtatctgtggttctggctgcacctttggggtcatgcagactgctaggctgtgggcggcagatggcctttgatagctcagctctctggaagtctctggaagcctgacagagccacaatctatccctatcattttcttctaacactgagctcagggcaggggagcgggggtcagatgagtgaaattaataactacattccaccactatgctgcactgtgcattttagtggaaggtgagcagggcaagaggctcgtgctggctcgcctgtaattactcagcccgtacatgggcttaggctcctctaagagctctttctgggagagggcgggcagtcctctctccatctgacctctagcctcttctcagataaacatctcattcccaagagctctggccctagttcaaggggaaagatgggaagggcagggtgagaagcggcccttccccttctcagctggagctccgcatgaaagtaacacaggaaccaagtgcaggagtgtttgggaaagctccaaagactgtccagatgacgaggaagccctgtgagccggaggctagactacccttagtgcacagtctgcctaggattaacccccatcctctctcacacagtgtcaccagatgtgctgcaggccctcagctgccatctttctaggtactgatgcagcttcaagttaaaaatgccaaaggtgcattggactggggaagcatcttggactaggacactggaaatcatttgctaactgtctcactacattgactccatttctgcagactcctgagaacagcctcccatgtctgtctttcagacacatgcctagggtctggagtgacagactgatgtccccactctcagagattggggtgggtctcagaaaaggctcagaagcaagactgctaggctggaagtatagtgaggattttggtttctttaaaaaacacagaagtaggaatatgtttttattttaatcccagatgtgggatatgacgctgcttcagactgtccatagcagctgactatgatttgcctcgtgctgtagcagaggtgtgattttgccagttacagatagtttctgatagtgtgtgacttttcagagggtatataaatgctaggtccccttgaggtgggtttgggttgttaattgttggttagtagttggttgtggtttgttaagtagtcacgcacaaagaagaaacaagaagttagatatcctgacagtgaagatcaaacttgccccaaggaactcgacactcctaatcagtagagagtagtctaaaggtaaggttgccccctttcccctctgtctctctcctaatgttcaggggttgaaagagtgggaaagtggtggaagaaggaagaacccacaaagtagcaaacacaaacaccagctctgtggtagaagagtgaagaggaagtggccctggagggctgagtgtggacacaggtgggggaggggaggtggcagtgggaggctgagtgtgaataggtgggggaggggaggtggcagtggagggctgagtgtggacaggtgggagaggggaggtggcagtggggggctaagtgtggacagaggtgggggaggtggccgctggacctgatatggtgtcgggagcagccattccctgacgtaaagatgggcaagtgactggctagcctcggtgcaaatggggacgattccaggttgagatggtacagggcctgtgtagtgaagtcaggctgggagggcagaggaggtgttgtccaacagcggtcagaagagatgggcaatttccattgtttggctctcgctccttccttctgctgtgtgctgggaagcaagcgttggtggtggcctccgacttccatgtggcctccatgggcagcatgtgagctacccccctcctttcctttccccacctcttttcatctcccttcctttcaagagtgttgaaattaattaggcaacaagacatttcttcaaaactgctggtcctgcataatttatagataccagaagtctcccaggcggctccagagtcattggagctgccagtgtttgaagcatcagctatagggtgctgcgggaacactgagacaaaccggctcctctccgggcagtgggttgggttgagggatcaaaaggacacacaggtttaaaattggaaacctgcaaatgagtagccagttgtcatgcaccaaagcaggagaagaaagaaaacaaaaataaataaataatcccctcacaaagctacctgaacagtgctgaaaagcagggtaaagggagcttgcagattcccgtcatgctcaaaaagaattaaagccctctggaggaagatagcgagctcgtgtccaaagcctgtgggacacatgcgacacagtcatcactccagtgtgacagaacggttactcaggtctcgagaaaggccacattgtggtagtaggcccttgttcctcataggcagaggacaggagacctcagatggctctaaggtgctactcacactgcagcaggggaaaggtaaggagtaacttgtccccgtgggcttctatgggcccccggtcccctcggggcagcactgatggcaaggaactgcttctgagcagagtaacggaacttggaggtccccatacctcacaaccccctcctcacaggcgctttgcttttcagagccaagtttgttttgataaaggaaccaggtgttgctcttttttgttttgatagaaaatacattaaaccaagatttactgaaaatgtggaaagtggttttacgaccagccttgagccctggcttcctgcagcttgaatctggaaagtttctgtgaactgtctggagacagacttgccttgagaggaggactcttggcacttgttgtactgagtgcagtgaggccagcaagccagcttcaggaagttctgtcagaaacagtggtttcctgcgtgcctgccaggagaagctgtcttctccttggcctcctgaccccagccgtgcagacagtgaccaaagctcaattagacaatggacaggacagcgtcttgatacttcctgctgctcacagaaggggctggctcacgcttgcagccttgtgaaagataaagcctcaattatttgaattggcagagaagttaattgttcttttttaaaatgtagggtttgttttgagtgattatggatttatatgcactttaagaaatatgcaagcacgcttactccttatctaagatcaagtgacaaggtgcagtgtgtgctttgacccctgtggtagtgtctgaaaacaccaccatggtctgaaccaggactccaggtttaatcagatgatttccggccagtggatgggtggatcatgagattgctcttggaaagatggttcccaagaggaacagtatgtcctgctgtcctactgtcctgctgctggacagggccaggtggggaagtgtcagggcgacaggagcctgcagagcagggcagtgtggccatgagctttccgtacagcttctgcgtgcagggcaaggcagaggtaggacaagcagacttcagggcaagcagacttcagcccatctagtggaaacggctggggctctgggccacaggcgtactgcctgcttgtcagctgtctggtgtcttggatggcaggagcctgatgcccgattatgtgctggtttgtttttgtcaccttggcatatgccagagtcacttaggaagagggaaccacaattgaggcgttgtctccatcagattaacctgtgggcgtgtttgaggggcatttcctttttctttaggattgatttattgtttttatatgtatgtatatggatgagactgaaggaatttacatacaccccgtgagtgcaggtgtcagctgagggcatcctgggttacaggtggctgtgagcatgttgcatgtgggcgctgggaagtgaatcttggatcctctgtaagatcattgcaacatcagtaagtgctcttaaccactgagccttttcgccagcctgcctgcctttctctcttctctcttctctctctctctctctctctctctctctctctgtttactttatatgtttgggtattttgcctgcatgccagtctgaacactaggaagccagaaagtggtgtcagaccccctggaactggagttacaaatggttataaaccacgatgttggtgctggctaggaattgaacctggagtccatatagcagtctctagtgctcttaactgctgtgccacatctatcagctacattttattgagcctcttgtggggcattttcttgattaataattgatgtgggagggcccagtccactgtgggagatgccatcctggggcaggcagacctgagttgtattagaaactctgagtgagccatggagagcaagccaggaagctgcatcgtcctcggtctttgctttaaattctgcctccaggttcctttccagctcctgccttggcttccctggatgatgggctgctcctagaagtgtaatgtgggaaaaaccctttcctccacacattgcttttggtcggtgttttattacagcaacagaaagcttacaggaacaaggtagatgagaatatggaatagtgtttgttggttggtttttcagaagtgtgctggaagggaagtcacttcctgtctctaagactagctaatctggggagaggcagcttgggtttgcttgagaagccccaagataccaaagtatcataagctacgctattcctaccatagtaccattcctactgctggcccccaatggccacgctcatcccactgcctcccccagagctccaggaaccactcctcttgtctgcccactataattttgtcatttctgaagtatgctggttagtttttgtcaacttaacacaagctcctgtggtctgggaagagggaaccgcaactgagcaactgcctccatcagattggcctgtgggaaagtctgtggggcattttcttgattgataataattgtcatgggaaggcacaactcccatgggaaggcagtgccacgccccaggcttgtggtccaaggtttttataagaaagcagactgagcaagccacagggaataagcctgtaagcagcacctctgggatttctgctccgggttcctgccttgagctcttgccttgccttctctcagtgatggattataatttgtaagctacaatcaattctttccttctcaggttgcttttggcatggtgtttgtcataacaacagaagcctgactaggaaaggcaagtgtgaatagatatacagatcacagtgtgccatctttggagattggcttttatttacccagtcttacccagagcagcctcacgtgctaaccgtgagttttattgatgagtaacccagggtgtggatgcaccacgctcgctcattcaccactggctgaaggatatcactggctgcctgatttggaactattgcagggcggtgctcatgcgcaggctcttaagcaacgtccacttttactcctgtggcatgaaagcatttgcagtgtgcagtagttgtgtttagcttttaggagaaaactaaattattcacttatgtgtggctgtggcacacggtctagctcctcgtatgtggttttgctggtgtggtcacccccacaggtgtgcagcactttccaggtgtcattgtgtccctagtggcctgtgctgtgtgtgccaagctcttcacaggccagtccctcatctgcgggtctccgtgcaagtctctttaggtcgcttcttggttggatcacttgtttttttttttttttttattactgactttcccgggttcttggtttggtctagtgggactcctctgtgtgtgtgtagatgcttgcctgcttcagtaggtatgtctttcccctttaacacaatcattcacatggtgaaagctctgacgtttaagaaggtccaatgttcatttatgaattctttaggtatcaagtatgagaacctctgccaagtataagaacttttctggaaaagtttctagttttctacacattttatattttatgtaatatttaagtataatatccattttaaagttaatttttatataagatgtgaatttgagttgaggtcccccctttggaaaaccaaacacctgcagcatttgtggaacagtagtctttccttttgaacctgtgatagaagttatggacatgggtccctttgttaggaccgtatagtactgttgctgaagctgtataacaagtcaatagaactgtctcccctccccgtcctccctctcccttctccctcctcctcctctcctttgagacagagaactctggctggcctggaacccactatgtggccctatctattctcagccttctgacagtcctctgcttcagcctcccaggtgcatgcctgcatatatacatacatgtatacatttatttattattggtatttttattactgtgttttcaagcttgttagcgttgtctgtcttataacttttagaataattttgtctatatcaaggaaacatctcttggaattttgaagggcattgctgttaactctgtgtaggatttgaacctctttacctttcacattgagctttcatattcttccacagtatttggttatttgatttctttcacaacatttatactttgtaaacatacaagtatacccatgttttggtagataagtgtgaatactttttgaaattgcatttttttttattgtgcatgtgggagcaaaccatactccatgtatagaagtcagaggcagcttgcaggagtggcctctccttttcccttgttcctgagggaagaactgaggtcactgggtttggctacaagtgtctttaccaactgagccatcttaccggccccagagtactctggccattattttgaatgattgtaggttgagttgtgcctctagttttgaagtgttaactgatattctataggaacaccggtactggcggtaggtctctaactagcttttcctttcttgctcttgcttgatacagaaacagggcagtgagcttagcagccttgctgagcagtgatcacagggaaaatagtcactatccagcatttgactatggattcagctgtagacagctgcaccaagttgaagaaatttctgttcacatttttctgaggatagcatgactaatggatgaattttcagatgccctttttgcatcagttgatcatgttttttgtttttgtttttgttttttttaatcctgtcaacgtggtagattacattgaatattgaacaaccttgtatttcctaagatctcatttggtggtgatttatactcattatagacggagtctttatgctaattttgtcaagaatttctgtgctgtgttcatgagggttattgttagctgttttcctgattttacactgtttttgtccgtttgataactccagattcatgaaatgaattggaaagtaccgcccccctacacacaccagttctatttcctagaaaagagtggtggctggagagatggctcaggggttaagagcactgactactctttccagagaaaaatttcctgagtttaattctcagcaacctcatggtggctcacaaccatctgtaatgggatctgatgccctcttctggtgtgtctgaggacagctacagtgtactcatatacattaaataaataaataattctttttaaaaaagaaaagactgtataattgatattaattattctttaaatataagataaaaaccttccaggaagcctcctgagcccggggatttaactcctttgaaagtttgaaaatttcaaatttagttttcttaataatcaaagggctgtttgcttgtttttagtgaactgtgacagcttgtgtttttaaggaattgctttgtttgatctaagttatcaaatgtgcatagaattatttgtaacagtttctcgttcttttgatgtctacaaaggttgtagtaactggttttgtattgataatttatatcttcccttttcttagccttcctagaagttaattggttttactgataattttcccaaaagcaactgtttcattgatagttacattttgttttgttttttctttcaatttcattgatttctgttattttctatttgctttgggtttattttgctaattttctagatcctgaggtggaagcttaacggattgacttgagacttattctttttatttattgtattttattagtctttgaaaatttcattcttttaatcctattcaatccttccctcaaccgctccaagattaacccttcccatagcagtgagcttagctgcatcgctttggttcctggcaggtcgcactccagccacccacccaggatctcacacacgcgcgcacacacacacacatccacacaagttagtttatgatatgccactagctcaaaggctgggcactcctaaacctccccctgcttcccctggcccagttcttacatggctggttggctttctctctgcagttcttacatccatcctttaccccaagtcatggcaattccctagctccttcctctccccagctcctagcctacaaaagtgtcaaggtcccacctcagtctacctgcccagtcattggcccttggctctttattgattaatcaaaaaccaactggggacaagaaccttcagcattcggacgtgcaggttcctgattttgggggctgaattaattcaaaacattagaaccaatccccaccttccctccctacccagccacctttgcgtcctctttttattttttaaataaacccatcaagtctgatttgtgctgcccacaagcttgtggatgtgtggccttccactggggtgatgggcttcccagaggctataccactcttcgagaaaatagaccctctctctcccagtagccatcagttgccagtagctccttagccagaggaagcgtgaggtacccacttctctgctccactagtggatttgggctacctcaagcttgcacaggtcttacacatgctaccactactgttgtgtgttccttgtacagctgccccactctgcccttgtagtcctccaccccgcttctacaatggtccctgaaacttggaaagaaggggtgtgagacatacatcccatttaagtctcttactctgtagctgggccagttgtgggtctctgtgttaattgtcgtctactgcaagtagaactttctctgatgagggctgagagactcataatcttctgtcagagtttttaaaagatttatttatgccaggcagtggtggcacacactttcaatcccagcatttgtgaggcagatttctgagttcaaggccagcctggtctacagagtgagttccagaacagccagggctacacagaaaaactctgtctcggaaaaagagagaggggggggggggagggagatattcagatttatgtatttttaaaaacatacatttatttatttatttatttatttatttatttattttatttatttattatatgtgagtacactgtagctgtctccagatgcaccagaagagggcgtcagatctcattacgggtggttgtgagccaccatgtggttgctggaaattgaactcacgacctttggaagagcagttggtgctcttacccactgagccatctctccagccctgtattttttgtatatgagaactccatctgcatgaatgcctggagaccagaatccttccttatacatggtatgtgagccaccatgtggttgctgggaattgaactcaggaccactggaagagcagccagtgtacttaaccactgagccatctttccagctccttgtcaggtttgtttatttattaaaattttaaagtcagactcttactctgtagctcagacttgtttataacttgcagtgatcctcctgtctcagctccctagatggtagaattatggatgtgagccttgtgcgtgacttttcctcatttctaggtattttgtgtccagatctccctcttggcattgatctccttgcttcacagattttcatgttttagttacacttttcagtacgtttaaaatcttatttagatgatgtattcgatgcatagatacttaaagtgtggtttccatgtgcagagaggatgttgttactgatatctagtttgattctgttgtgcttggggagagcactgacctggctcttgtagtcccatagaggcgtgatagtccactaaaggatgtgtgtggtccatgcctggggcacagggagccatgcatgctctgtggtcgatggggaggtgccccatgaaggtcaagtagactctctgttaacagtgttcaagtccgctgtgtccttgttcagttttgtaggatccgtctgtcagtttttgaaagatctgtgttgaaagctctaattgtaattgtgaatttatctgcgggtttctttttcactgtgtcagtttttatttcacagatgtattttacggggccattggctgttgcttaggatcgccgtgtcttcctagtggactaactgacaaatgtgtcacttttgactgttaatgacattgtttcatatgagtatagatattcctttcaattaagtgctctttttttttcccacaataaaacaccacgatcctaagcaacttgagggggaaagggtttatcttgcctacatttccacatcacattcataattaaagggagtcagggcaggcactggaggtaggagctactgcagaagccacggaaggatgctgctcactaactcactctgtgtggcttacctggtctgcttccgtatagcacccaggactctcagctctgggattgtactgtctccactgggctgtgccctccaacatcagtcatcaatgtagaaactgaacacaggcttgcccataggccagcttggtggaggaattttctcagttgagcttccttctttctaaatgttctggtttttgtcaagttgacataaaactaggcagcacaagcattatatgtgtcgattaggctggcttcacatcctgcctttacctcctgagtgctagaattacagacatgtgccttcatgactggctttgagacacatttcttaagggaagatatgtgtgtgtcactttttgaaatgcactctgccaatctctagtcctttaatgggtgcatttaggccatttatacttagtcaagattttgatatctctaggctttaaaccccttccttccttccttccttccttccttccttccttccttccttcctctctctctctctctctctctctctctctctctctccctccctccctccccctctctctctctctttctttctttctcctgttttgttgtgcatttagtctgtttttgtttctgttttcttttggatgaattgaacatttgttaaggatcctattttggcttattgaagtgttttgagtggttgctctttgtactgggttttatactataaatatctaccaatatcattttaccagtttccaagtgaaatgcagggcagccatctccttccccagccttcattaataacacagagcatcttgagtgtctcctgcacatacccttaatgccacgtggttctctgccgtcactacatcgcccgtgactgaggagattcaggagaaggaaacccataattacttgtttttattaactttgttttcttctttctgagatttgccttgattttctctcctttcctgaaagtagagttctgagttgaaaaatggtgggcccttcattctgggcacagtgacttctaatgagaggtagctgaagaattccagtgtgacagctttgggctccccatgtacttggaaatgaccttttgcctgtggtctgtaaataagcccgatcaactcagaagctccccacggcgaccttggtgggattgtatgttggtttgttgtggggccttacaaggaggactacatatgtttatatcttcccggggaagaaattcttacaactggtatatctaaagtatactatttgatgaatctgagcaccagtctgtggagctatcatcatctccaaaggcttcctcctgcctcagttgtctgtctctcatccccatccccgtcagtagggaggccctggtccacttcagctgcctgcctccccctctccctgccgagtatagtgtagctatttggtgatgccctcacattgtggagggtgtcagtagttctggcctgcctaaggagttgccctgcatcacatctctgctgacatgaggtggcgtttgtactgtttccagttggggctaatcagaatgaagccgctatgaaggagcacacacacatgcattccttcctgttgttaatacccagcagcggaacggctttagaatttacagttaaggcagtgacttattgtagttactttttatgtataccttgatgggccaaggatcactttttagcctattgtttattgtgttgtaatctttgaagattatcctttcttcagtgaattaacttgaccctgttgtctaaaatcaactgcttggtagacaccaattgtactgctgtgctctgtgttccagggcctttggtgaccttggctttaaagccattgttgaaatggggtagtcctcaacgctgttctattcagtgttcatttggttgtcctaggactttgaattgtaatagaagtttaagaatccttacgtcagtgtctaaaaatactctgctggggctgtgtgtatgtgtgtgggtatgttaaaatatggatcagtttgcagatattggatatgttaacggttctgggtctttatgaatatggtatttaaatattttaaaatttcaaccaccttagttcttaaagctttaagacccatcccttaaatgtctacataggtagcaatgatatctatgaatacaaagttttatttctcccttatctcatatcctttacaatttttttcctaccttatatcagtggctagcatgtccagtgcactattgactaacagttataaattcagatttccatacccagtttccaaccttacgggacaaaccttcactgtttgatcatttgaatatggtgttggctgtaggtttatctgtggatgctgtgtagcaggaggtgcccttcagaaagcttcagttttgcatggaagtttaattttgtcagatgctcctgccatctggtttttcattaattcctggtgatggagcacactgatgttttaatgttaaaccagatgtacattcctgggataaatttcatgtgaacataaaacattgtcctttttacatgttgcttgatttcatttgctagaattgtgtgaagaaagggctagggatgcagtgggtggttgagcacttacatagcatgcatgaaacttgggaaagaaaacaggaaaggaaaacagagatgttatgcatgtgcataacgaaggatgggttactgtggctcctgctcttataatctcgttggctctggtattgctaagggtatcacttttctgtttttctggagtgtttactataaatttggtatttttttctttaaatgtttgtagaatttaatcttgaaaactctctgggtcagtatgttgaaaagtttgtaataggctaaggatgtactaagtggtagaactcttgtctagcatgttcaaggccctgggttcaatccctagtagtccaaaaatacatagatagaaagatagatggatggatggatagatagatagatggatatgtggatggatggatggataggtggacggatagatagattaaatatttttctatttttgctttttttaaatagagggatctgagtgtatgtacggggcttgaatatgaatgtacatgtgtacatgctggtggctgcaggacactgtaacactccccccgacacacacacacacacaagaactggagttacaggcagttgtgaaccacctaatgtgagttctgggaaccaagcctggcttctctgaaagagcagccagtgctgttaattgctgagctgtctccatagcccatgtgttagctattcttttttttttcttcttcttcttttttttttttttttttttggaggggggtgttgtttttctgtgtagccctggctatcctggaactcactttgtagaccaggctggcctcgaactcggaaatccacctgcctctgcctcccaagtgctgggattaaaggggtatgccaccactgcctagagcattagctattcttgatgagtatcagtaatttatgtccaacaagatattttccaatcagttaggttttctggtgtccgggcataaagttcttcataatgttcccttattttgtttttagttttataagatctgttggttactttttctttaattctcaataatgataattgatattgtctccttttttccctcttaagactggagttttccccaattttactttctcaaagttctattggttttcttttctctcttttctcttttattgttttcttctcatcatctgtagacttagcagcctggtttctaagggggagttctgtccactgatctggcaccgccccctcatatacacacacattagtgctaagaatttccttccgacctggacattggctgcatcccttaaacatgatcacgtcagagaactctaattcattcacaaactgtctaatgccttctttatttgtctcttgatcggggttttatttaatgtgtgctggttttctttcacatgtggggattgtctcgatgtgtgcattgttgaccacttgctctctgtgtgtgcccagagaacacaggaataagtagtgaaagccttctcctggagaccagataatatttttaacatttatgagctgtgtatgatctctgtggcatatggttgtgttttaaatccttaaggaatataaaaaccatctgcaaatcacggggtgtacacaggctgcaatctgtatttgtcctgcactacaggctgtgtgtaaaagcccgggccttccaggtaatcaagacagtcaagacagtcagacccaggtaaggtgcagcgggctggggaagacagatgtacactcagcagccgtccaaggcagtttgtctctggtcacgcattacaaacactgtccactccccggccagtgccgctgtgcctcctgtcatgagacctaagtcacacaagccccttcgtagggtgatctgagtcccatgtacgccgtagcatagatcacatgttaaccaagtggcccagttacttctttgttgctgtaataagcactttgaccaaaaccacatagagagggctggtgacagtccatcaccagggaagccaagatgaggactgagacaggagctgatgcagacactgggggatgctgctcactgacttgcttcccctgacttgctcagctacctttcttacacagcccagaatcacctgtccggagatggcactgcctgcccatggttgagcggtaagaaggctgagccctcctgcatcaatgaacaactaagaaaatgctccaccacacatgcatagaagccagtctaatggagcaggtcttcagttgaggctttctcttgcaggatgtgtcacactgaccactagtgctaattatgacaccaagcctacttccttgagatgcaaggaccagtacccttcttggtaacctttgggaaagagacaatatcccatggtgggattataaaagacttttacttgacgggactgacctgtgttctcctcccctctccggttatctcacagcataccctgtggtttgtcttgggatacactccactacatttggttgttatcacagttaggttttccatgggcgtcaggaaggcctggtgggttgattgactgtatcattcacaccttttagatgccaactgattttctgtctgttttttcagttattaagagacaggtactggaatctctgactataattatggattattggtttgcttactttttagttcttgctttctgcagtttgaagttcttttaagtgcataaatattagaatttgtaccatgcttcttggttgaccccttatcattttaagtgactttgctctgaaggcactttggggtatagtaggatacagcagtagttttcttaggcttggtgttggcatgaaacatccttttccatgctgttcctttgaatctatccgtgtctttatatttaaactgggatttgtataaatagtctattatccaatctgactatttctttagatcacttacctttaaagcagttattgaactgtttgggtttaaccccctgctattttgctgttgtctgttgttccccagcccccatctgttgctggtttctgtgctggtttgaatgagaagtgtctccaatgggctcagacatttgaacacttggttcccagttggtggtgatatttggggaggtttagggcacacagccttcctagaggaagggcaccactgagacagaccatgagaatatatagcctcacccagtccttagttctgtgtctcaacctcgtgcttttatctgaagatgtgggctctgtggtcaagcctgccacagtgacaggcttgccattcatagctcgcttttggccatggtgtttatcacactaacagagaacaaaccaagtcagcttccttacccctttctccagtgtctgtcctcttctttttttttctcttagtactggggataaagcccagaatttagctcattccaggcaaattttgtaccactgagctgtatccccagcacttcctgagtcttttaaattatttttattccattttattttctttgttatcttactatatggatttctaaaaaaaagatttctttttattttatatgtatgagtgcttgcctacatacatgtatgtatgtccctagtacccatggaagccagaattgggcatctgatccccacaaactggagttagagatgattgtgagccacagtgtggatgctgaaactgaactcggtcctctgtaagggaactgaactgctgagccagctctccgcccagtgtttgccgtcttttctcaggagttactctggtggcacctctttagcacaccacagtctgtctctcacaaacagctcagtgcttccttccttcctggcttttctgctgcgattgctatacatttttcctctatgcatgccataagccccacaaagcatgcttatcagcttttgtttaatttttattatcttataaaaagacatagggaatagtgaattccttacagctatcctcatattgccatgtcttgtgctcattgctccgtggtcccagttttcctctgatgtggcttccctttgacctgaagaacatgctgtagaggagacttctgtgctctctgctggcaatgtaacggctcatcgtttgcatgcctggggaacttattgtttcctctctattgttacttattctcctttggtatagaattcttaccagcattttcttccactgtattggaatgtggccccattatctttcagtttgctttgtttcttatggaagtcagctgtccctcttacaccaactcctctgtcttctgaggcttgtttgttttttaccccaacccccaatgcactggatataagcattttaataaattttctaacgcccgttatttatctggaatctgcaggtttatagtcatggctaagtttgcgatgtttctgactgttgtgcatacagttcttttccagtgttctttttctaggggctctggctgcctgtgtgtctgagcactgcatattgtctcacaggttaagtagccaggagatatagaaagatggaaggacaaaattagaattttaaaagaaagtattgttaattaagagtcaagactttgttaaaaaaaaaaacaacacaaaaacacaaaacacagtaacccagaaaatataattgtaaaaagaaactaagcaaaatatagatcaagaagagggaaactgcaaagcagattttaaatggtgtgagagtggcgtggacagtttccatgtgcaacagtgtgccaagagtggaaaaccttagtgtgttgagcacaaaatctctcgtgcttgtggctgtttaaatgctttttccacatgtatgtgcaccacatacatgaaatagttgcagaggtcagaagagggcgtcagagcccccagaactggagttacagatggttgtgagatgttatgtgggatctgggaattgtgctcaggtcctctgcaagaacagccagtgctcttaaccactgagccatccttcctgcctcttccctctggttttgtttgctttttttttttttttttttttttggtggcaaggtctcctgtagctgaggcagccaaggttggccttgagcttctgatgcttcggcttctccatccaagtgcagtgttacagactacgtcaccatacccagcctcactgccatttatgaagaactccaggaccacccctaatgccaagaaagaaaccagcaatgctgttagagagttatttctgcaaaagacaagtccaccgggcgtggtggcgcatgcctttagtcccagcactcgggaggcagaggcaggaggatttctgagtttgaggccagtctggtctacaaagtgagttccaggacagccagggctacacagagaaaccctgtctcggaaaacctaaaaaaaaaaaaatcaataagtccttttaagtaacactcctatgatggcaattcttggttgtcaacttgactacatctggaattaggtaaaatccaagcagttgggtacacctgtgagagatttttttctctaattatatcatttaaaatgggaagacacatttttactccagatcttttgaggtaggaaaacacatctttactccagatcttttgatatgggaagatccacctttagtctgagccacaccttctgcttgaagcctctacaggggccatggaagaaggaagcttctgttctttgccagctagccctcactagcaagcccattccttcactggcattagagtctacttttatggaattctggtgtatactgaagaccagctgagacatccagccttgtggactgagcactactggattcttagactttacgttggtagatagccattgttggactagctgggccacagcctgtaagccactgtaataaatccccacttatggatttttttcatacatatttatacacacacatatgttcattctatcagttttgccctccagagatagcctcaccctgactaatacaatccacttcacctgcctctgcctccaagtgctgggaataaaggtgtggtccaccactgcccaagagagagggtttgatgtcggtaatggcatcactcctgaacactaggtccctgctgtatattcaactggctattgattgtagtgtgcttattttgcttaggagatgcctgagtggcttttggttgtgtttttcagttgatgttcttgtatacccacaaacttcatcagctctcccttctggtccccgtttcccaccgtgcttccctctgagtcataatttaggacaacatgtctgcaatgtctatgaaactttgagacctgggaaggccaggccaggacacaggcttgaggggccacctgctgaaggcagcgggcagccactctgctcctctgttcctctgatgataaggactgtctcccagagtccctcccacggctctgctctcacctcccctgtccctccccgagccactgactggcaactcttcccccatctgtagcccccagtcagccacatcctgccccaccccatccaggacaggccctggctgtgtaattttagcttcaagagcaactttattggtcagctttctagaataacctgagcacccagcactgggtgggtgtgcaaatgcatgggactccctgagctgtacaagtgccttccctctgcccccttgaactcggagcagctcctccacagtgcattgccactcctgactctgcagctttgcacttgtaggccgcccctttccctgtgcagctacatccctatctgtgcagcaggtcctgaaggtagaggagctgccatccacatcactccatcccagcaccagcgaagcctggttacacactgggtctccagacccgtgaagaatgcttactgaattagctggctcttttccgttctgccttcctgtgtctgggatattggatgccagcatccagctaagttatgtgtgtgttaaacatgaattgaaatgcaattacagctggcaatgtggtctgaggagcgagtaatagagtaaataagaagagtggcgcagtgaggcaccagttcatctccttggcagtcttgcttgctgtcattgggggtgactcatgagttcagcttctcttaactcctttcccttacctcttgctgccttctcttgttgggtctcttcagagcctctttattcaaacctgcaagaagctcagggccactcctgatggcccaagcagagagctgggcagagaggagcacacacagggaagtaggggaggagctatgccagcacacagaccagacttctttccaagcctgggagtggtctgcacactgaccctagcatcactagacatagggctcctggtcaggggtgtggcctcccagtcttcttaggcacacggttttcacagcctgtttagttgtattcagaactgtgtccaatggctggacctccctcgagaagcttggttgacttgattgatgacagagctgcctccttgtcctgtagagggcacctcagtgtctaagggttttcaggatcagtgggcacatgtggcttatgaatgtagactctacagacaaaccttaagttccttctcagcagtcaccctcctgagctcaaagggggcttccacaaagctctggaagggactgattgcatgtgtaattagcagtgatgtattcagggccaccttgtgcaggccccaggtggggttctgggaatcaattagtgagtgagttgggatagttcccaggcaggaggatacatgagtggagaactaacaaagcctggccactcccccctcttctgtcccaaatcattcccccaggtgtgtcttctcctgcctggagtctcactggaaagtccctctgccagtctctttttaaaaacttttttatatttattgtatatcgagtgtttgtctgcatggatttgtgtgtaccatgtgtgttctggtgtacttgtgggtcaaaagagagcactagagggactggagagatggttcagtggttaagaacactgactgctcttccagaggtcctgagttcaattctcagcaaccacatggtggctcacagtcatctgtaaagagacctgatgccatcttttggtgtgtctgaggatatcgacagtgtactcatgtacataaaataaataaatcttaaaaaaacagaaaacaaaagcactgggataaagaggaactagagcaaaggatggtcattagctaattatgtgggtaccggggattaaacaggagtagcacatgctcttaactgagccaactccttggttgcattatagtatatgcatgcatgaatgtatgcatgcatgcatgtatgtatgcatgtatgtatgtatgtatgtatgtatgttatgggtgttttgcctacttgtacctcatgtgtacttggtgcccatagaggccagaagagggcattggagtccctagggctacagttacagatggttataaactaccatgtgggtgctgagagtcaaatccaagtcctctggaagagcagccagtgctcctaactcttgagctatctctccagctcccagtctcttcctcctttaccctcgcctggacatgaaatctttctgctgtcccctgggcaagcagacatgaccagcgcctttcctgtcctgctgtcccttccctgggttgtccctctgtccctctccatcatctccagctccccacagctagtctctctcaacaggtcacaggtctctaggtcttgctctccatccccgcctcctccttcccagtgttgtgtgtccatcagtttgtaactcgttttcctctgtgtctacagtaccagctgaggcctccgcctgctctcctgtagcctgtgctggattgctcataccctctgattgtcgctctgccctgcagcctctcccctttgcagtgtaggctctgactcagctcctgtagcacctgtccccttccccagtccagttacacagacccaaaactgtgttagacatcctgccctcttcctagtggctggcttctctttacacctgcctgagagactagtccaccacggacggtgagtgacagatggcagtggcctaacctcagctctctcttagttctagcctccaaaacagagcagccaactagtgctcctcacagagcctgggctctctgtgaggctccacaccggcaccgtacctcacccatagctggccctggctctcacaccacttctgtatcttacacaagacgactttcagtcagcaaattttgttctctgtgttccttatgcacagctcgttagtatttgaatcttttctgggtccactgtctgagttttgtttttgtttttttgtgttgttttgttttttttttttgagctaggttctctgtactcctgacctcttgcctgctctgggactgttcgcactgtgtggaccaggttggtctcaaacctgcttctgctgggactaaaggcaggtgccactatgtatgagttttttaaataaaaattatgttacaaacatttcaaatatatgggaaagcatcagaaacagtgtaacaaatgtctaaaggaccataggcagcctcctcaagactaaaaggtctactaggctcaagcagctctctagtaaagaaaataaagctgggggtggggggggcactatgcccctttcttccaagaatttgcactgcttctagttggttttggatacacttgtgtttcttctggttccaatttgcctgggttctagtccaggcatggataatatgcttggagtagtctccagcttgctcctcccccaccccaagtctgttcccaagggttgccattgctcatgtgtgtggccttagtgcacggccttagaagactgcatggacttctattttgtgaatggacttgaacttaagtctgctactcctgtgggatgtgggttctttccagtagtttcccacagccatgaagagcactgaagtcatagtctcagggtttgcttgcagtttcttctggaacagttttgtggtagtcatgctggatcctttgctcctgcctggctgtggagaggagtcctctgaagtaatgtgacaggtcaggctccactctgacacagaggcccactcgcctgacctccagtggacatagagctttgtcagacatttcccgtgaatagaagtcacaaccattttgaatttacattttcttcagaggtgagctgttttcttctacggcgtctccagctttctttctttttacgatttatttattttatgtgcactgatgttttgcccaagttcatgtctgttcgaggatgtcagctaccctggagctggagttacagagttgtgagctgccatgtgggtgctgggaattaaacttgggtcctctggaaaaacagtgcccttgactcctgagccatctctccagctccagccttgttttttaatcttactgaattgaggagttctctatattcttattttggctgttcacccacatgggctatgtactgctggatacagatcctgtctgggttagggttctattgctgtgatgaaacaccatgaccgaaagcaagctagggaggagagggatttcttggcttacacttccatactgtgtgtagtccgttactgaaggaagtcaggacaggaactcaaacagggtgagaacctggagcaggaactgaccagagaccatggaagggcgctgcttactgacttgtttcccatggtctgctcagcctgctttcttatagaaatcaagaccaccagccagggatggcaccacccacaatgggctgcccccaccccatcactaattaagaaaaaggcctacaggcttgcccacagcccgatcttatggaggcattttctcaatagagagtccctcctttctagtaactctagcttgtgtcaaattaatataaaaccagccagcacatgtgtcctttgtagtttgagggttttgttcttacagctggatagatagtataaggacttgaatttgatctccagaataccttattaaaatttttttgaaaggggctggagagatggctcagtttttaagatcactaacttctcttccagaggtcgtgaattaaattcccagcaaaggtggcatctgtaatgggatctgatgccctcttctggtgtctgtgaagacaaatcactcatatccattaaaataaataaataaatcttttaaaaatgataataagttttaaaaagctgggtgtggtggttatgcccatttaagcctagcattagggaaacagagacagggacatccccgaggctcactgttcatccagcctggcctacttggatagttccagaacaacgagagaccctgtttcaaaagtaaaactgggggagcgcctgagggatgacacctgaggtggttatctgtcatgcatgagaacaccagtttattttagaggaataaaataaatcagaacccttgtacacatgtctacttctttaatcattccttctgttgaagcaaagatctattttctgctgaaagttttcaagttttgcttgatttgttgttgttgttgttgttgttgttctgtggtggccacagtagtgtctttatgctgttgattgcgtagtctttgcctccacccttagggtccccaggtgctccagaaccaagagcacctttggttctcctttgcatgctcataagctgtgaggacctctctaggccaccagaccatttcccacagctctgtggaggcctggggcccagctctgccctggccacctgggtgtggtaaaagctagacacttctggccaggccctttctctctggcagcctctcctctcctgagtcctagtccctgagttccctgccaggaagggcctcctcggggccatgatcactgctgcacctccagggtttctgctgggattgtggctctgcttctttctcttctgcccagcccgagaggctactgtagctgacacgtaagctctgcatggggaaagctgcctctggtggcctctgccataccaaacaccaatcttgccattgtccatgttccagttttaaaattctgccatttggcaaatgtctgagtgcgtattattactaagtctttgggctagatgcttgggaaagcatccactggataaaatagaacccttgaattgagggccagaggtgatgagtgtgtgccctgtgccaggtctcctgctaagtgctttattgacagttcatattctatggtttattactgttcagtccattttagaatatacacagagctgcccaacaattaccaatatttaatcatagatctttgttcctggctcccctccctctgacagcgaccacttccttcctttgtatctctaaggattgtctcttctgggacattgtaggagagcaaaccacagtgtgtggtttgtgactgtcttgtttttcctagcatagtgcttctatggcatgttatattggggcttcattgccttctcgtggtccagtgatactccactgtaactccgcgatgtccgtttgacagtggacatttgtgttgtttccactgttcagcgacttacctcatgagcatgttgtgtgtgcatgtgttcagttctcttgagaatatactcagaggaggaactgctgagtcctgtggtgataccatgaggaactaccctgccatttccagtgatcataccaggtttcagggccagcagggcccatgcccttgcaatgttgcctatctgtctgtttcagtattgtaacaggtctgacagggaatctcgtagtagataagtgatcttctgtgttttatttggtcctaaccaataatcccatggggcctactcattcatatttccgcgttttgatggggtggaatgagtcagtatgactctgggaaatgtctgtgagcagcagagtcaggacctgagctcagctacaactcactccagaaatcctggttctgcctgctgagttcacagggtctgtgtgatgggggtccttccgccgcagcccagacaacaagatcattctgtcatggagctgttaggggctggcaggagccagggtagagaagacatgtctgaggagagaacaaggggagcaggcagccagggcacaaaggatgggagggctgagggtcctgggccttgtgggagagaaacccaccctgaggctggcagaaactccagtcttcaggacagagccaggcattcatttctgagagatgttagacatttcagcagaaggcctgtggctgacctaagttctccatgcagaaatcaaagttatgaatggacacaaaagcagccgggagtccatgatgcaagccaggggcacagcctgcccttgatctcacctgggcctcgcctcagctcccagccttcaggccggctcagccttgtctgacagaggatgtgaggcttctgcaggcctgcctgagccaagctgccattgtgcagcctttgaacttcagagcatcagccagaagttgcccctggaatgtctgcagaatttcctgcccccctccacctccaactgccctgtctgccaaactcacctttgagttgtgggtgggccttcctgaaaccgcaggtgtgagcaggtcccctggagactgctcttcctcctcagccggccctctgcatcctacatgtttagctgggccccagttcattcacaggattttctcaagttgcagtctagcagattttcagtttctcacctcatcaagtaaagcttacaattgttgtttttccataaaagctgtaagtgttcattgaccaaaaaaaaaaaaaaagtgacatacactagcaaagcaaaggaacggtttaaaatgctctgtcgttatatatttatttgcatgaatttgtgtgtgtgtgtgtttgcatgtttctgtgtgtgagtgctgtgtggatgagtgtgtatacatatgtgctctgctgccctctttgatcgctctcccccttatgtattgaagcagggtttctcacagaatctggggctcacaattttggcctgtgcctagtcagcttgctgtgggattcccccagctcacctcccatgcactgagctggagcaacaggctgggttccacatctctgtggcttttacctggcttctgatgatccagactcctgttctcacgcttgccctgctgagtgagccactgcaggtggccaccagccagccttgtgtatctctgtatatcctcagcctccactgttaaagccaaacagtgctttgcattttagtttctagctcctcttctgtccacagctgttaaaacacaaaactggaccccgtgagcagtctctgtcctgtaagaaacttcttcctcttgtttgtctttatgaacagagagccctagtgaaaacacagactggtccccacacctggctcctccatcttctccaggagggactcccttcctccctccctccctgcctgcctgcctgcctgcctgcctgcctgcctccctccctccctgcctgcctgcctgcctgcctgcctgcctgcctgcctgctgcctgcctgcctgcctgcctgcctgcctgcctgcctgcctgcctgcaggtctccaggtcactttcttcccatccagaagccaggctgagctgctgcagagcatacctccccgttctctccaagttgctgtcagttatccttctaaaaacgtactgtcaggcattgcattaactcctgttcatttatgtgtttatcatgtgtccttccctgtgatgaatgtgcctcatgtggtctgtgggacccttctccctcagcagccctcagaagccaggcatcctcagtgaagggacaagggacaactcaccatgttctcagagtctgcctgcaagcagaactcctagcacctgggacattgtgtgttctcaggctttggtaccaaagtcacctcactgtggagcacccctcccccccccctctccctctaaattccttgagtgagtgagtgagagagagagatagtgtgtgtgtgagagtgtgagtgtgtgtgtgtgagtgtgaaggagagaggagagtgtgtgtgtgtgtgtgtgtgtgttaggtccgaggacaacttgtgggagtcagctctctccatataccaagtgggtctcaaacgcaggttgtcaggtttgacagcaagtgcctctaccctcagaggcctctctcagtgggctctggttttccctcttgtcacacagcagtgatggttttgtctgttcttaggacctctttgcattgattgttaggcagagcccctctgagatccataactagccaaggccaggggttgctcaccctttgcgaggctctgtaccattgctggttgatgtgtgcagcctgcctgtggactagagtgtttgccttttctatggccttatgaaagctctctgcacatattctcttatgtgctctcttataagcacttttccctctgacatatcctggacacagccctgggcatatgtcatcctgtgaccatactgcatgtgtgcttgggtttcctcatctgtaactcagacagcagcttcatctcctcaaagctttgccgtgtgcactgtggggccatggatgacttacactgaggagttagggagaagaaatgtgtggtgagaagcaactgagtgagggaaaaggacatccaggcctcggatggaccaatgtgctttctctccctagggcagagttcagaatcgtttcagtgagcttgatctttccattatctccctggcattcacctctctgggcttctgaaaagcctgaggacaccctgggtcacacctggacgtagagatcttttaagccattcagcacccccatgattcaggtcttacaaaataaggaaatggtttggcatgaagatttgtgttgctatgtctcggtctgttttcagctgctgtagtctgtattgtgctatagcgtccacaaactggacgtttatgaacgatggaagtcatttgactctggggtcttgagtctgggaagcccaagatagaggagctatttcccatgacggcttccttgtgttggattagtgtagcagatgtcacagagtgtggaagtgcagaggaaatgtatgagatgaacacccctgccacaacaacctacccagagtaacatcatgagtccctctccaagggctgcacccgtttgacctaggcaccctcttaggccccacctcttcagcctcacagctcagtggcagccacactccagtctgggctttggaggagacactgaaccatagtacagtttcacacctctgccatcaaagcaaagcccaagcactgccatgcctcaaaatgtgcctcaagtgtccctgtatctatagccttcaacacttagccggccctcccagctttccctcagcacagtgatagctgggcagtctttaatgtgcctctccctgtctgcttgggcccttctgtgttccagataagcctgcctgaggtgtgtcaaaagtcctgaaggcattttcccagcagtgggcctagggggtctgggttttttagcatactgaatgactggagtaagtttgctgctgtcttcaggttcagttatctaagctggtgtgggtttggtggggcagggggctccccatgtcatttgactgtcaggacccttcagtgaaaagcggtaggtgacttgcttagaccagtgcctgacaaacagtggactgtcagcaggctgctgccctatgcctagccctagccaggggagagcatcccacttggctttggtccttcttatctaggcatatcagctagctgcaggcagctgggacactgctcaaagggctgctgggagctctctgataatcacttattttctgtgacagccaaaggaggaaatgggaggctgggcctatgaggtccaaataacactgctgtccctgttacctactccctctcagggctccctgggttctgcagctccaacactgggcacccaaaggtggatgctggcagtggagaaggctggaatcagtagcatgtgccaccagacataatcatcagttgggaaatgtgttgataccatctagcaaggcatgagatcatgggccgctagaagggccagtgactctcataccacaactctctgcttcttccaaattagaatgtgccttttaacaaaccaacatatgcatgcagagtttggtggtggcgcatgcctttcaatcccagtgctcaggaggcagaagcaggcagatctctgtgaatctgaggccactgtggcctacatagtgagtttcaggccaactagggctatagagagaccctatcttaaagagtaaaagctgctggctcacactagcactcaggaagctgaggcaggaggatcatcaagaatttaaagtcaggatgggaggaggaactctgaaaggagagaccaggatggggggcagcatttgagatgtaaataagttagttagctacatacatacatacatatgagtttaaagtcagcctgggccacaaagtgaggccctgtcttaaagcaaaaacctaaaaatacaaaacaaagcaaattatgaaagcctgacaaaggcttatgaggaaagatgtctttccagacttcccagtttagataactgaaccttgctctgccaggctgagctggtttggtttggttttccctctgctgctgtatctcagtagtttgatgacacaatttctttcttgagttgcctgttttatgtttcatgtacttttcccccttgtaaggcagtgtcacagatatctgatgagtctcttcttggcagtcccatcttgtgacagggcagacactgggtacaactgaaggaactggtgtcacctgggcaccagctgactccaagcctgggctaccgggacaagtcagcctccttcagcactagaggcgctcggcagcagccttggggtcagtacccagggcagtggcctcagtagaaggcagcatgtgccttggagagtggtgagctgggaagggatggagggtgagcctcctgcttagcttgctggcttcagtcctgggagcaatgctgcttagggaagttgcacgaggcatggcttcttacagctctggctgggtggtcgccttgctcacccattcctttagtgagcatccactgagcctctttgtgtcaggcacagtacttgacacagagtggcaccttctggtcctggccgatggtaggagaagactcacctttgaagggacagattgagtcccagagatgatgcaggaatcttgggaccagagatcacaagtaaccgctgtgggacaagttaggactcatgagtgatagtgtggcacagtgttaaatgcctggttccacagcatcctcacatttagtctagaagcagagtcatctttgcaggtgccttgcatctgtagcatctcctgtgacccctggggaaggcagcaacccctggggaaggcagcgtgcccactttacatcgggcatggtttcactaagctgctgcattttaagttcagctctgcctctgagttccatgctgcctgctccctggtaagggtcctggtccttccctgtgcccacagactattagctcatctgacttgggggagacattcaggttaaccagtggctttgtgttagtaggttgagaagtgcctgcctagtgcagcggtgactgtggctaaggccactgccattgctctctgaagcctctctcacaaaccttcaggttcctcttgccatagtgacctttcctttctctaccctcagatttgctaactgtcagttattcagtctgagaaataagtgtttttctcttgttggctggccttcggcttttctgaggcagcttccggggtggcagctgtgctgggcctggggatgtagtgagaactgtgtatgtgttagaggctgctgaccattgacagtgccctcatggggatggagccactttcagctgtccaccatgatggccatctcaaggccatttccccatgcatacttcagaagtgcagccacggctccatcagaggatgggctgcctgcagctgttccatgcccatgcccatgtatggagctgctccctgggtctcctggcctctctgttgtgatgtagggcagttaggtgaggtaggaagggagttgtagggtcctctctccagtctccttgtcaactccatgtacccggcactcaaccctggatgtcatgctaataccacctgcccagtgaggcaaataaaggctcactttactcaggattatgtcctgaaggagaactgagagaggcttcctagtgagaccagaaataaaatcaactgaatctagtttattttcctatcatgatatgtttctgaccttgaattccactttgggagcttttatcaagaagatgtagtgtggagccagctttctgacctaccaccccagcccccacagcaaccctactgaagctccctctggcttactcctgtggtcaggaggtcacatcatccacactgcagggagtgccccttgcaggtgcagttccaccccatgtggctttcttctgtgccctatgtccgccccatgtaaatagcaacaaacagcctaatgtgctgaccgtcctgtcccttcccagtccattacaacaaaagctattctttgctcgttagaaccatttctgtcagggtgtctttaatcaatggcttccccagggacagtatttttagaagttgtatttttcacagtctccccttttcccttttggaaatgttcttcccggtgccgagtgtggcacactaatgagatgccaggagacttggggccggtgctaattggaacagggagaggagctgtgggctcacgctcagggggcttacgctccggttctgtctcctcttacctgtgaccctcttctccgtctctctgctgcaggttgcgcagacagcagatggcgtggatgctgatctctggaaggacggcttattcaagtccaaggttaccagatacctgtgtttcacaagatcattttctaaagaaaatgtgagtctgtcggtggttcccgtttgctgagtgggcaggactaatttccatttctggttggggcttcctctcttttgtgtgtggtttatgttcattgttgtattaatttatctattgtttcagtgaacagggtagaatcagcagccagcgctgcgtttcatttattaacaacattattaaccacatccccaagtgcacagtgaattccattaagatgtgttctccaaaggacatggggaacttcctctcgctgtgctttcagtgacaactcccgggcacaagggatgggagagtctgccagggccgctgggatggatagcatctgcaaagggcagaccagctcagtggagggggcgtgacacccactgccccatgacagtccccagacgtgatgttggccttgtttctaaagagcctctgtgtgacgtggggcagctcgtctttacggagaggtagccccctgtgtacagttctttcatactggtttttagtacttgagcacatgaactagggaagcttaaagccatctccaaaagcattcccagggaggccagcctgtgtctgtacctcatttcttcctgagatgaccacttttgctctccaccatgaccctctggaggaggtgataagttatctcttctaatttagatacttatttttggaaacattttcaccaatttctaagtgtaattataatggcttcccaagatgaccactttagcaccccaccatgaccctctggaggaggtgataagttatctcttataatccagacacttatttttggaaacattttcaccaatttctatgtgtaattataatggtaatataggctgtagttaaaaattaaaaacacaacagtataaaacatgccaaatagaaaaatgaaagaagccttctttattacagcctcctggccagtcacagcctccctgtccctcacaacctctttctgtctcatagcctccctgtccctcacagcctccctgtccctcacagcctccctgttcctcacagcctccctgtccctcacagcctccctgtccctcatagcctccccacccctcacagcctccctgtccctcacagtctccccgtccctgacagcctctttctctctcataccccatctcttcatcatagctctccaacctcggaccccactgccaagtctgggttgtccctacagcagttctgaatgtggactgtaagcacttgttgctctttggtaatcttttgttctgaatattgttcttagcatgttcaggatgaggggtaaagtcatcccattaagttccctctaattataagagcaatacctttgctgcttgtaatatatgactgaatagggaaatctttttcctaccggcctttgagtgcattttcagtaacaggatggtggcagctgagccagggtaggcacctgcacagcacttgtggtgtgtctgcatagatcctttgggtccactgtagcctgagggggactccacacagcaggggtaaggggtcatcaccttacagatgctgagctcatgaggttatcagtagacctaacacgtatccttcccacccgcaccctcgtgcacccatgccctcaggctctctgtcccaggagtctacccaaatgcctttagaaagccatttctgcttttccctcctgttgtccctgctctgtctgctgaccactgcttcccgtggactctcaggaggaagtcctaaagatttggtcaaatgccttgtttaagttactttttgttgctaagatgaaacaccatggccagggcagcttatcaaaggaaggagatattttggcgtgcgctctgagagggataaacatctatcacgcacggcgggaggcacggcagccagcgtgtggtaggcatggtgataagagcaggaccctgagagctcccatccttggagcagagcgagagctagaagtcccattagcatttgactctcaagtgatgaacctcctccagcaaggccgcccctcctcaacctcccctaacagccccacaagctggagaccaagtgttcgcatctgaaaagcaccacagccctggacagtgttgctggcctcagaggatagccgtggtccctgtgccacttacactgggacctgttacatttactcctgaatcttcgagctgttggccttctaggcaggcgttcgtgaagccctgggagctggggcagcaagtccactgtggtgcagggaaggcactggactcattggtttggggtggattatagaaagcacagtcctcagcttgagggcaatgggagagcacttgcttagtgtgcatgggaccctggattcagccccgggaactgccagaaaacacgttgctccccatcagtagctgggctctaggggtgataaggctgccagccaggagggcagcaagagacacccctgccctcggctgaagcccaggtgctcgggaaccaagttagcacttccatcctcagcaccagaagaggagtagatacccttcactgcgtccaaatgacaaaccaggggacagaattgctttgggatcaaatttgggggaatgacagcctatttgccagcccttgagtgaggcaggagctaggcacatcctcactggtggcggctgcctgtatgtcctggtctatagtcagagcacaggcttggcagagcaccggtttacaaccatctgggagggtgtgggctctccagagcaggccacagcttaattagctgacttgagactcccaacataggagtttggggagcttcctttgaatcctaaattcctttcccccaatcagaccattaatatggaaacctggctggagagtgacaccgcttcctgggaaggagcgagattaattgcacttttcatgccccgcactttctgtgttacctgtaataataatgtgcatagattaggtagggaggatgttaaacagaaggatttatgaacatttgaatattaagttggttatctgtggctaccttaaatgcaaagttgtcaaaaataattacagtatactagcaaatactggctaccagagacaatataaataccctgcgtcagtgtatgtcgggcccctggtatgaatcatttgctcagcaaggattgggaatacgttcttcatatttatgaggaggaaatgaaagagagcaccagtgggggaggggaaccaggaaaattaatggtgttgaaggcctatgatgtataaaaaaggtgggggggggaggtgagggggactctgcagactggcagccccatggaagagggccacaccctcggactgtaggaagccttagcagggcagccctccattgtgtgtgcatggacgggtttcccaacacttgtatagtggccgcacccccagtgcttgggttttaggattaaggcattgtttcaagaggtgaggtggctaagtggtagcagttgacttccatggaatcccgcatgtcaagccaaagccggtcaacctgatactgatgaatgcccgtccatctagggggcagcagagcgtgcccaggtgttaatttctcagtgcaggaagcagtgatgacatggaagagcagggaggggaagggaacagaggacagtcgattagactgggctgctccagaggcagctggttcttccacggttcccagctgggcccggccttcatgtatagttaagagtctattccacattagagagggcccactccccacatgccgcacctcagtgatactgtcttcctgagcaccattggcaagcccagggatgctgagagagaaggacagatgtccgatggtacagtcatggatgtgctggccacggctgtacctgccactctgacttccgaatttcaactcgaggcatgttttacttataggccataatagctaataataaactttgggaattttggtgacatggtttcaatttgccatttgagaaagtccgattcagtttatgattgctaccaccccaccctgttgaaaagtttgtcacaaatatcaaaatacttagccagaattattgagtccctactgtgtgctaagaactatgccagcttgggtgagcagaaggagcaaacattattttggttcctatttagtggtgggagccaggacccatagtgtatagcttcttaaatacatctttcaaggtggtaggtggatggatgcctcataaggtcttagtcactgttctactgctgcacagagacaccatggtcagggcaactcttaggaagcaaagcctctatcaggaggcttccttatgatcactgtcatggtggcaggcagcacggcagtacatgtggtgttgatcagtagctatatcctgacccccaactcagagagagagattaggccaccccagtgacacattttctccaacaaggccataccccctaatcctttgcaaatagtgccactctctgataattaaacattcaaatatgtgagccagtggaggctgttctgactcagatcaccacggtgtgcaattataaaatgataggaagttaaaaggatcttaaagatagagtgtctggcttcattcagaaagcaaatatcccctgtgtgggtttcagagatgtatatgctgtaaagatggaagtagagccagggtttccaaagcccaggatgaagttgggtccatctctaagcaacaggggaatactggcctgagaggttcctgggagggcagagcctgggttgactccttagatgttagtccgggactgcagtcaagctgggcttggggggacacagtgcctctgcaaagtgggcacacacagcacattgctggaatcctaacaggaaagattccggctgggaacccattattcttgccttaactggctctgacgaggctgagatgactctgaagacgtgaatgtaatctccacagcagccctcatgtttaagatgtagggcagatttcttaggagctgtttctagtatgaagtgagggctgcagaggctggcgtgtttgcaaagaattctctcttgcaattatagaatggtgcaccaccaaccatcttcaaaaatgtctttatggaaactgtgcactgtgggcccctcttccagcactaaataggcactcttacgagctcccctagcgaggtatctcagaaggcgtggggtacggaggtggccaggctgcctcctgctcagtcagtctatgattcttgggattttgtaaaatgtaacaacggccccttaggtgtgcgatcagaccttgttcagtttagacacagctccactcttgcaagcatctcagaacctcccctatttaaaacgcactgaccctgagaagtggtggggtccagggatgtgcgcacacctaccctctgctgagtggctttgagattccacagatggaatctccttttgaggtacactagagtccctggtaaatgctagtatcatcttctccaattaacccgctgtggtaaagctgcagcagccactgtgtgaaatatgcttcctgaagccaggactgcaagcaagactaagttccaattaagtgtgtgtcttgtcttttcttcccaagagtcatttggggaatgtgctggtggacatgaagctcatcgatgtcaaggacacattgcctgtgggcttcatccccatccaagagaccgtggatacacgtgagtcaacacttaacacacttgccttgggagcggccacctccatccagtgggcttgcaaatattctatgtgtttctctctggaagtctgtagatggtgaaggaatcctgccacttatgacagccaccttggatctctgtgtgtctgaagagtgtgtgggtccttggcctgcaagtgagcagagtctttgattgatgcctcctcactcaaggacagagcagggagtctagggacagttggtttgccctcagcaaccaattcatagaatcctagagtactgggaactctggtcctggagtgctggggagtgccaagcttaacacaagaccctgaagcaaaagggagggagggcagagatcaaaagatgccctggggctgcaaggaacagctctgtgcctggtctggggctcacagagtgaacaagaggcaggccccagaaagacttcaagttagagcatgtaagacctaaattggagccagatgtggtggctcatacctgtaatcacaacacttgagagatgggagcaggaaaatcaggattgaagggcatccttcactacatacaggttctgagcctggggtacatgagccgctggctagttaaaaagcaacaattaaaacaaacaaaaaacccacgatttaaattagaccggatgtttcaaccactgagcaacatcgcactgtgctaagctgcagggaactgtgggaaatggagaagctgcttcaggatcctgcgggtgttatgggctctggtcctggagtgctggggctgaggtcctggagtgctggggctgaggtcctagagtactgggatctctggtcctggagtgcaggggactctggtcctggagtgctggggctgaggtcctagagtactgggatctctggtcctggagtgctggggactctggtcctggagtgctggggactctggtcctggagtgctggggactctggtcctggagtgcaggggactctggtcctggagtgctggggctgaggtcctagagtactgggatctctggtcctggagtgcaggggactctggtcctggagtgctggggactctgttcctggagtgcagggctggtaaggcagtgtcaggaagccttgtgtatctgagcttctttacgggtgcacatgaacttgccttatttgtaattacttgtagccagtctttgctactttgtgggttcttttcctgacctttatcccagtctccccatttcaccctgtcactagatcagagagaaagaaggagagaagagagagacagagacacagaaggacacacacaaagagagacagggagagagagacagggagagagagaaagagagagagatccttacatctaatttctttccttttgtttcctctttgaccatggctactaacaaaccacagctaatctccttgaaggaccaacagccaccaaccctgcttctaggggccctagtatttatataccctctgaaaagttcccagaatttcaaatgtcacgcaatcatagaaactatcttcagctggcaaaaccacatctctcctacagcacaaggcaaatcgtaaatcagatctctactcctgggattaaaactaaaacacattcttatgtttctggtttttctaagaaaccagaactccaaaactgtcactacaattactcatgagcccatgccacagcagcaaaacggggagtaagaaaaaagagatcctcatctgcgaggttcctttacggaattctgtaccctgttcttcgtcagtatttataggtatgtgattctttttcacattgtcatgctgtgaacgtttctggaccagcattcgcttgctgttttcacacagagcagcttccatgtctcctcagccacccccaatggcaacttatttcagcaaagcagcggcccctcactggctgattcacttgctcgttgggccatgtcctagcaaaatgtcatggtgctggttggctttaactgtcactttgacatcacccagaatcgccttagggggagtctcaactggaggattacctggcctctgggtatgattgggtggcaggggattgtagtgattgttaactgactaagtccactgtggatggcaccttccctgggcaggaagtcctgggctgcctgaggcacccagggaggaagcaaggatacatttgtttctctctgctcttgacagtggatgggacatggctacctgcttgaatttctgccttggtttcccctcagtagtaggctttaacctggaattgtaagccaaataaacccattcttcctcacgttgtctttggccagggtgttttatcctagcaacgaatactagggcactgatatctgctatgtttcatgtaaggcccctcgttaagtgctgtagcctcatgagggcactttacctttaggagagctcagtagagatgggtgttaggcctattttaatatgagaaatataaggcacagtaactatatcttagccaaaagcaagaacacactcatacacacatatatacacatgcatgcacacacacatgcacatacgtacccacagacacaaatgcatacaaatgaaaatgcatgcacacatacacacatgtgcataaatatacatggatacatacatgtttacattcatgcgcatgcacataatcatgtgcatatatacacacgtgcacacacatgcacacagatatatgtacacgggcatacatgcacattcatacccacatacatatgtagctgcacatacatacacatgcacacacatacaacatactaatgtgtacacatgcataggcatgcacagacacatacacacatgtatgcacaaacacgcaggtactaagcaccttgcacatctagactttatagatccatgtagcaggatttgttcaataatgatttattaagatacatttaaataccatgtaattcacccatttacagtacacaatccagggtgcctgccaccatgctccttctgtcaccacatggaggcattacctccagccctccacctccctgtccccactggctgacgcttagccagtttctgcctgtttctggtaactcctacacattgtcatgccgggctggggaaaggacccagggataaagtgctccctgcacaaacggggaactgagtctggatcccaagtgggaaaccgagggatgtgccctgtctgccttccagtcctctgtgggaccgacctggactctagttcctgtgccctaggagtcagcctggctctgcagcttgtgcttgtagaaccccaagcagctcccctgcctcagtttacccattcgtcaggtgagaaggacgctccctgccttgtagtgttgctggggcacccgggtccctttcaagttttcctatgtctctgctacttctcttgctccttgaggacaggacggcaggactggtccatctccagctcgtcccaggctccatcacacacagggacttgccggctgagtgagttctgtcaggataagccttattgccaagctgatatctcacagccttaaggtcactttgcctgctcagtactggtcacccgctggcactggtgctctgcctcttacgttgctttactatttaaactgtatttcatttatagtttgctgcttatgagcaagcctacctcctttgtaaatgtctgcttgctagctttgcctcttcttaggtgagggttccacttggaaattaaaatcaccttgttgatttgcttccaaccctggtctgttttctccctaaggatttcaaagttttaaatatttccttgatgttcatttctgacagctagctgatgtgtaatgtcttttgtatggatatatggcatagccacgagggatttcctattctgaattttctgtctgttgagctcgttcaggaggccctgttgcaggcccgtgctctgagagggaaaccagtccccatgtttgcactagttgctctccagtgtgtcctgggttctgcatcacgggtgtaagcacctccagtcaaggaccgtttctcaaagacttcccaggggaccaagagcctcatggtcagcccagtatctcctgagagtacttaaagctttgatttcatgaagtcagccaaaaagatgagactcctgtaattaatttaaaatatagcccgctgcagtccgtacagcacttaaaccctggaagactgtttgttttagtaaagtgttgtgtactctccctgtgttcattagcatgactgagcacatttctattgactatgtataatatgtttacttaaaatgaggcctgcttaagcatgtgtaatgaatgagtggatctggtcttaaccaggctggctgcaggtggaggcatggagccaaactgtggcaaaggcaggcacaatacctgccccaagtgttaccccacaggaggtctctagcgcatctcctttagggcctgaacttgggagatgatggtggcaggttgcttctgcaggatgtcatctctgcctcaaggatgatgtttaccatgtgggttagagacatttctacagcttgaagatgccatgtgtccctctgctttcattcctgggaaagaacccacaggatttgggcatttcagcatggccttttaaaaagacatcccccttttcctaaaacctagcaagaacccaacaatactctgattctacaggtccacaggaccacccttctgtctgcctgcctgcaacaagacagtgtctctggcttttctttattgagcacttactgtgtgcccagaactggccaggaaaccatagtaccacacgacatttacctgaattgctctggagtgggcttccactggacaggtcccttgtacagatggcaaagctgagacccagagggtttaagtgacttccaaggtgccagtgccagcagtggcagagctagataacatccaatacaggcggagcacacacctgtaatcccagtatttgtgaggctgagacaggagcatgacaagtttgaggctgatctagggtgcatagtgagaccctgcctcaaacaaaacccactacagataatggaatgctgagagtgggagaagtcgtctccccagggaagagcccctctaattggttatccagtgccgagtggtaggccctgatatcatgtacacacaagaaacatcatacagactgaacaggttacatctatatatttaggaatgtatacataacaacgattaaagaaaaagaggttgggagccatgaatttaagagtgagtaaggtaggggccaggtgttatgagaagggtatagagaggaaagaatggggaaataatataattacattttaatttcaaaagtggtaaaaaatttaaaaaccacaaatccaactgaaagatttatggactgttggaaaaagtacagaaccacagatgggcactgtcaccagttgctggagcaccagccgttgtgcccagactgaacaagtgactgcacagagccacacactggctctccttcctgtccactgccctcctcagaggctcaaagaactggtgaagaaaagccacgttctagacagaagaacatgaactcatcaatgcagaagtgtgtacaacaggagaccaatgctttgaaacctagaaccgatgtgtggctcatagctacgagcatcctaaaagccacagccaccagagcagtgcacaggagggtggagacccaggcctgtactgggccaaagctagccagctctgataggctcctgggtgagggcagaacaactgggctttttgtttttgttttttgttgtcttggtttgttgttgtttttcttttcctgcctttctctgccacaaaggaagggggagcagagagaggggcttatagagtaaaggggaccaaagggacctgacagcccactccagagcacacagcctctggatgtaaatccagacaaagggcagggcatcctgtgatcagacaaaggggtggggcagggcgttgcgcaccgatggagaaacttgaatttcagaccgtggatgagttcaggagttcccttgttgttagtagaagtggcagggacgtggcagccatgcctcctggtggggcaacatgatgtagcattggagatttgttccctatgtccaggaaaggtagaggtgtgaccagagtggagacgagccagagtgctgagcaggggccggtggtcctgcctgcaggtctcactccatggagtatgattgaggatttctatattaaaaaatgaaaaaggggccttccagttggtgtggctgtggcctgaggaagccgtgcagggacatggaggcagcctgggagtcttggccagcacatctggggccaggccctgggcacagggcagggtgactggtgtacttggctgtcatcacctgtccttgggggcttcagcaagggcagggagcagagcttagtccctctgccaagtgacagggtggccctccccttctgcagcactgaagggagaggcggggcatctccaccaatctcacacctttctatcctcctttccttagaggaggtggtctttaggaagaagcggctctgcattaagtttatcccccgggattcaactgaagctgccatctgtgacattcgcatcatgggccggaccaagcaggcaccgccccagtacacgtttatcgggtaagtcgcaatgtttcctacctgctgtctcttcccctgagagcagttgagccactcgtgggcccaagactgagaagtcagtgtggctcacaagactcagctatgctcggtgttggtgttcaccactgactctacctcagcctacgtcagcttacactgcagctgctcaaggtggctagggtctgctcttccctttcaggcccctctacatcctgccctgaggccactgtgggcctcagctcctcatgccgcttatcaacctgggccattttacagccaacctgtctgtgccactggacgcacagatggtgtgggaagggagggcaagggaggaagggagaggggccctgccctcacagagaggctgttctgaagggagagatgagcagtgagcaagaagatgaacaaggtcgtctctgactgtaacttctcgatggcccgtgagctactccggttcagataccaggcagggttactgagcacaggtctccaggtgatgagcaccagctctgaggagaagctgacctgggtgggtggatgggagtgagtgtgacacatcctgggaagggaggtcacctgtggacacaccagggcgagtgctgggccatcgggtcctagttgccttggcagtgatcagggcctgacccacagctgctccacaagctccgaatgcaggcagatcccagaacttcattttgggcccatgagactgagtggcaggaagccccacccagcatggcttacgccagaggaagcattgttggctgacacagcagccaggcttggaactcgaaggatgagaacacctcatttcctgcgccctcagtcctctggtgggaccctacctgatacctgttcctccaaggaggcatgacactgctgtctctttgcagccacccttcagaagcgagtccggagacaagatgtctgccttcctgagcttcccatcacaatcctagaattcagggtcctgggagcgccccttcctggttatttctgccacggaaaggtcctcccttcattgatcagcctgagttaggagtaaggaccagttcagtggagctcaaggaagagtggtgagggggcggctgtgccaatctgagaagggaggtacaaggtcaggaaggcggggctggggcgggactggggcggggctgggtgcatactgcacccagtgggttgagttggggtctcacagctcaggtccattcagtcctttcccgctgtggattctgcactctcagaacagacgaccaacacactttttttttttttctaaatatttattttatgtttgtgagtatttttgctgtcttcagacacaccagaagagggcatcagatctcattacagatggttgtgagccaccgtgtggttgctgggaattaaactcatgacctctggaagagcagtcagtgctcttaactgctgaaccattttcccaacccccaaccaccacacttttaaagcagacttgcatctactgtttatatctctcattacaatactattttaagaggatgcagttctgttttaagcaattctgaagaattgatttcatcagtatttgtcaatttataaaactagaattttcttccttgataatattttttaattgccaaagtataacttttatttcatcttgggcctagcctcctttcctagagaaagcatgatttttaagagaagtgagttgaggattccaaaatccaggtgccacatggtgaaggcctgtgcttgccctgtgggaagcagatagctcaggctagaaaggacgcagcctgcactgaagcaggtagcctgaggccccgaggaggtgggtgggcttgctgctgctgtagttggtctcgctcttgctaaggcaaggtcaggtttaaaacagcctccagcctacacctgggacccacagaataaatgtcttttattttttgaagagatgctgtccctcggcttccattcccatagacatggttctggggcagcagggagggcctgtgtgcagcagaaatgatcctgttcattgccaagggtgagcttgcctcattcccatcaggtgtgcagtgcagggcacaccacagtggctgtcacaccacaggagacagtggctcacaccactggagacaatgcatctactctttgttgtgctggtttgtgagctgtgaacctccggattgatggcttgcggccattttcccaactgaccttggtgtgaagccacgtttagtgattcctagctatgaggggccaagtcttgacaaagcaaagggtgcgggcaggctagcatgctcagtgggtgaagatgttcacatcacaacggcttgccttcgagacacagctgcactcctgctaggctctagtgcagcacccagggcgtgagagaggtgctggggcctccctggggtttatggcagttcataaatgtggtaacagttaactcagttgctcaggtcagtgctccaagctcaacagtgcattgagatttttcttttcttctgcagggaactgaacagcatgggcatctggtaccgaatgggcagagtgccaagaaaccatgactcgtctcagcccaccacgccctcccagtcatcagcctcttctaccccagccccaaaccttcccaggtgaggttttgttgggatctcaccatgcacttacatggtcttaggtcctgctgagccatgcaacaacttagaaaacacccacttacacgcatctgctaaaatagtgcaaaatatagctgaaaatttgcagaagtctaaacttgggccttaaaaagtcatggtcagaaatccacgaattccacttatgtaaagtgcactctatattctatactgtgtgtatgccacaggtttctaacggcaggaggtgtggctgcctgagccaggcatcgtgcttctcacccttaatcccgcactcaggaggcagaagcaggcagacctctatgagttccttgacagcctggtcaacacagcgaattccaggccagccaaggatacatacatagtaaggctctgtctcaaaaaccaaaccaaaggccaggcgtgatggcacatgcctttaatcccagcacttgggaggcagaggcaggcagatttctgagttcgaggccagcctggtctacagagtgagttccaggacagccaggactacacagagaaaccctgtctcgaaaaaaacaaaacaaacaaacaaaacaaagccaaataaaacaaaacaaacaagcaaacaattggcttgccattcaaatgagcttatatacacacagggatgtgtgtggcagccaggtggtcagcgcccaagggcagaattccctctcagctctgccagcaactcatccgacacccagcagggtgggtcagccatccctagaagcagtccttaacagaagtgagtttccagaacattacattcaattataataatagttaattccagggaggccactctgcagctgactgcactggcgctggtggggtaacgtgtctgaactctgcaagcagcagttgaggaaagactcccacaagtaagaaacagggcgtccctggggaagctgatagggacagcactcttgaattaagtctgagagactgcagaaatgaatggaaggagggatggcagatggttcgctgagggttgaggtgatatgagaccacattgaagagctgtccataggaagaggtgggtgtctttctttagcaggacagaatgggtgccaagccagcccctcccccaccccatggagcagctctcttcaataggttgctctgcccaatgcaagttgtccctccaggctgagcatccactctggggagaggctactgtggtgaccccagaccaaaagactctgtcttttggactctgtgcaggcctcccgcaccaggagcagtgtttaaaggtgaccagttgagtctgtctctgctcaggagtgtggggctggcatgacgcggggtgggcacatcttccttcctcactgactggtgatgctatcatggctctgtcctgggccattggtcagggggtcaccataacttctgccagcatcatttcaggtcctcatctgtgctgggcggggtcagctcaggctctggtgcccatggtcagctgcagagactactgagcctttagggctcaactgccttgaataaatagagccagctcccccaagacatgtggtctaggagagcccagaaatgggcatcacctcaggcaggtgctaattcctgtcacatggaataaagccattctaatttgttttcaattgctgtggaaaaacatggaccaaaagcaacccggagaagacagtttatttggcttatacatcccagtcacagtctattattgaaagacgacagagcagaaactgaagcagggaccatgaaggagtgttctttttccatggcttgctcagcccgcttccttggagcactcaggaccacctgcccaggggtggcaccatcccacagacctgggccgtcccgcacttgccaatctgatggaggcattttctcagctgaggctctttcctttccttttgaccctagcttatgttgagttgacagaaaccttaaaagtacagggctcttactatcctggaggagacagggagggtacttgtcctgagcttgcctgtcacaggagagccaggtcacctactgtcacagcaggactctgggagctggtggggttggaaggtggcacaatccaacagagtgctcataatacttacgtattttatgacctgggtgcagtttatggtttacaatggctgcaaggaaattggatcagttctgtttacttgccaaataaaacaaatgtcaaaatagtcaatataaaatgtattctaatttggctgagttaagtcagccggctttggctttcaggaggatccccctgtatgcaaatggtgctgtgtctccagctcctctgtggtgggtgttgatttacaggcccggcacatgctgtgggagcctcttaagtcatctgggtttcgtgtttttatcttttgtgggttggcttgaattttatccttttcctattcagattctttgtttttttttttaagaaaagaatcagtagttacttgaattttctattaaagtaaggaagggttgagtgtggatttttttactttttttcttcaagatgctataagatgctgtaagagactctgtaaggagtgccggctttaaggtgacatgaagtccctgctctcccccataggctgcaccccactaccatgccctcccccactcggtgacctgtctcccagctccaggccccagagttaagtcagatgggtacccagcacccacacacacacacacacacacacacacacacacaccctattcctgtcttattctgagcctcccgtgagtcttgcccacccctcccccgcccctcccaccactgggctgccttgctcaggtcacttggggagcccctctcacactggctgagcagtcctcggtttcactgtccccgcacatgtgaagtgtaaaacacatgcttttcagcagtgaggaccccatgttcttcccctccagatgactccccatccctatcacagagcagtgagtgcttgagggaaattggcagaatatagaaaataatgggcaaacaaagcccatttccagtgaggaaagtcttataaccttttgttacatttccttcaagctctttcccctgtgtacttttatgtaggtgacatcatcgcatatatagcaatttcgtaaatttcccatggagcgttaaaccgcaaacatcagaacactttcctggtctttgtgtggggacacctgatctaagcaccaaagcgtaactgccaggagcgtggtgatggggtgccctctactggccagctaggaggaggcaggaggcacgctgggtgggagccacaggcaagagggagatgaggtggtggcaggcaggagcctgggagtcagtttcaaaagcaaaggacatgttctctgccaacgcttggatttaggcattcccagcagctttctggagagctgtcatttctaactttactttagacaaaaggggcattggctgaccttttcacaggtgacaggccgtcacctttgtcatctttcccaggagcaggcagttcccacctgggcctctccactgctgcaaaggtattcatggtaaaagttgatctagagccctcccccttgccttcctgcacagagatctctgggtaggcaggatgctcattggtgatgtcggcaaattagatattgagttcagtggagtttgtgtcagaagccacataagtgtcttgacagaactcaccctctgtccagtgagccctagtttcacccactctgcttaggtctctggtttgtcctggacctggaacctgtgtctccctccaggcagtgagcatccatccccgacccactagtgttgcacacagtatccagtaggatggggtgcctaagggctgagggcataatttatctccctacccatctctgggctggcctcagccaactgggccaaccttgaaagagggggtctgttctgctcagggctgccacctcagagcacgtgtaccaataatggaatggtcttccaacagagcaccccatgccctcacacatggggactcacatgtgacaacagagtacccccatgccctctcacatatggggactccgtgtgacaacagagcaccccatgccctctcatacatggggactccatgtgtgactctgctggaatggagagcttctgcagctgcctgaactcaggtttgtaaagcctcgggaatccatggctgagagtgccaggagccccgagtgcttgaatggatgtgcctgtgttgcttggtgggctgctgaccccagcttgctgagcagtagaatcagaagcctgataagagtcagagttgtgcttaccaaacccacagatgacacagtcactagggagagtggatgtgccagaggataggattaatcctgtagatagaactccatagccacagcaccatgggaaccaggaagtaggaggcagtggtacaaataggacctctctaaggtcacgtggcctacagtatagggccaaatcaggagacctggcccagagggtgggtgcgtgcaggtgtgtgtgtgtgtatctgtttgtgtctgtatatttgtgtatgcccgtgtctatgtgtgtatatgtgtgtttgagtgtgtctctgtgtctgtctgtgtttgtatgtctctgtctgtgtgtttgtgtctctgtacgtctgtgtgtgtttgtgtgtctctgtgtgtgtatgtctccgtgtctgtatgtatctgtgtgtgtgtgtgtctctgtgtttgtatgtctctatgtctgtgtgcttgtgtctgtgtgtctctgtgtatgtgtgtggtgataaaccaatccgatcgagagcttgttaccaagcaccctgctgtgtatggccaggctgcgtcacctgtcaggttcagtgcagttatgtaaaagctgctgaactgcagggtatagagaggcagatggctccagacatctaaatggctagccagcagagagaaagcatggcattcgtgagtgaagggaaaggggtaagttgcaaggctgcagattagggagtcaaggtttctttcttttctctttgagactgggtctctctctgtagctacataacctaacttgttatgtagatcagaaatccacctgcctaggcttagagatgagcacctccccaggtgcagagttttaaaaacaaaagaacaaaacttcacaaaagtagattcggtggcttgaaggagctgttgaggggtcatgagcaactgctgagggtttgctggaaagtgtccctcagatgctcagatggtgagggtggcctccagtgagtgttgggggtgagactgtcagtgtttgtgtaactagatcatgatggtgctgagttaatcaggaatttactgatggattcagttagacagatgattgggaaatgttagacactgggagaggtggnnnnnnnnnnnnnnnnnnnnccccccccccccccaccaacactttgaagtgagaaactactcagtcgaatgcctccctgcacccacactggtctccagagcagcagagctggctgaccacgagagccttgcccctccgggatatgttgttccagtaggaaaagaaatgaggacctcaagcctctctcaggccttaatcaagaaatgtctcatctacctcctaccctgacctagtgtagttcccagttgctgtgataaaacaccccgacagatacagtgtaggggagaaagggtttattttagctcattttccaggttacagcccatcatagcaggaagtcagagcagcctgaactcaggtcacatcacatccaaagccaggaacagagaaccgtggatgcggcatgctcgtgctcagcttgctttatccccttgtatacacttcagatctcctgcctagggaatgctaccgcccactttggtgctgggtcttgtaacatcaattaacaattaacattctccaggtaattccccataaatatgcacacaggccaatctgatttagacagctcttcactggggctctcctcccttctagattgtgtcaagttgacaaattaaaaccaagcatcaaacaccctttcttagaaattcaggttcagcagacaccttgccgtgtgtcaggagggctcagggtgagcgttggtcagtaaggcctgctccagagtccacccacaccacctcttcctctccagtgctggtggtagtgactgaggctccagttggagggaagctgccaccgtggcacatctctgaggtgggtacaggcaggccttgcccaatgcccaggcctcagtggtgctggcaccatgtctcagaccagtgctggcgtgtgtaagcaacagttactgtgtgaccccagaatggaccccagaatcctggacatactaatgcagtggtgaatgagggcacctagaaactggaacacatgcgctcagtggctgtgctctgccctacaaagtgcatccctgtttcggtcacaacatcctccctccaggtgcagcctgctgggagccatccccaggcgtcaggcaagcttgcctctctatgttgtggtacttggtgcttagagggccttgggggctgtcccagtgacttgtgagctaccagaatgttgtcagtcacagtttccaaagtatgtttctcagtgacagacataattatacttaactttttacatggatattatcagtctgtgacagataccctgggaaatggggcattttggtggcagaagatctgtcacacgcacttacttagtcttcctctcggggacaccaggattcagtcacaacttttgcatgtcggtgtcaggttttgagaacatcgatcctgctgacctcaaaaatggttcatcattcaggtcccagggctgtcatctaaaaggttaatggcctttcctgcaggagacaggaaatcacaccacctactctcattgctgtcatatcccttgtcacagcccatgagctatatgccatcctgcctgcctgatcctgcctccctgctggacccagggcccagttctgctgactcatgaagtgatctggttgactggaaaagtagcccccactgagccgaaccctcaggtggacagcacgatcccgtgtccacaggacagcctcagaccctcctcctgcctcctttcaccttcggttacaagggatctttgtgccatagatgctgcccccacttcacctgctgaggcaggactggagcaggaggcctacatggctgaggctgaggccagctgtcttccacttcctgtggcggcatgagcttccagttcttcatggtagattagtactgcaggcctttgcctgtaagaatgcctggcagattctactcaggcagaggacggctctctgctcaggcttgggtgagatgctgtggtttggtgtgaagtccatcatttcctgaagggtcagataaatcctgcctcctggtcagattaggagacagggctgagagctggtcccgaggagaattgttcctccctgctaatagccagtgggctgtagcatgggctgggttgttcttccatagtaagtcacaggtaatgcagaggtgggtggccactccgccccgatcctgccaagagaggttggggctcaacaccccaacagtttgatgttctttccttcacatgaaacccacctgaattttgcttaacaagatgctttgtaaggtgtagagctttttcacgcaaggcacagacatttgctatgaagtttgaaaccactgtgccttacaccactcccaagagaggaccagctgcagctgttagaggagaaggcaggcctgcgctccagagctggggcaggggtgaggctgcaggggttctgccagcgactcattgtggcagccactgtgagagtgaatgctcacctgtgagtgctagcctcttccccctttacagttgggggggagaccactgcttctgctggtcctggcctctctcctagccatggtagccccaaaagactggctacacagaaacagtaccggtgctggcacagtgacactgtgagctgaaacctttcaactacaccagagagtggttgggaagaaataaggccacaggtgggtcaggtgtccaacatttgggaaatattttcagaatgtgtatgttgattgtataacgtgagttagtgtggagccaggagtaagcatgaatacacctaccctcctttcacctgtggttccatctgtccagatatccgtcatcagctgcagatagcacagaacccacaccgtagtgccgggctgcctagccccatctccaggaccctgtgagcaataaacaaatacctagcaatagctccacaggcaggcgctgccagccccatgtcaagtggagagaatggaggctaggaagttaggccttccctagtgccccacagctggtgtctcagagccctggtctcagctcataggctagttctcttcaccccgcaagttccccctatgcccactgcctgtggttatgtgacccctggttcttgagtttattgagcttttattaagagctggacctctgcctgattgagtgtcagccctctggtacccagctatcttaaacaagctgcttctccaggctccaaagcagctgctagaggggaagtgggtggcagggacttcccagaggccccctggccagacatgatgtcagcttctgaatccacactataggggcgggagtggagtcattgagctatagctgctgaccaaagacagtacagtccatacccaaaggtccctgtgtcatactcctgtaacacagctccaggaccctgctttggcaagcattcaggcaggattgactctggagtcatgagaatactgtgggagccacctgcccagttagacgcttgtggacagagcctgtggctacctctgaagccaaacccagcttaggatcagcgtcaggataattttgaaggagaaatttcattagaatgcagtttggtattgttagatatgaatgatgactttaggctgagcaatacacttttagatattaatttttaatactgcttcttgggaagtcagggcttctatttaatgaagaattgactattagtcaatatggctcccacctctgagccacggcggccgtcagtctctcacaccaggttttaacaaggtgtctgctgcttgcaaatttgctagaactctgcagattgtatgacatagcgagtgtcttatttctcacagtgacagttgtgtggcttctacatggagcgtgtcctggaaagtggatgccaagtcctctctgaggcccgctctccagtgcatctctgctctgtgtatcagctcatggctttggagaaaggctgtttcaggattatgaaaatagttgttcgtgtgtcagaccagatttatcagctcactttagggttggtttttcgagcctggccatttagaggagggtatttaccttttatcagtgggtgctgacagtctgtttgcaggaaactccatggaatatttcacctgggtctccagtggaaatctggccgccaaacaaagtaaaatgagcaccagggctctttcccggggtctcaccccgcgccacgatagactgctctgtttcaagacaggatttcaattattaatttggatatttaataaaatcctttgccttcagtaactttcagaaaatcttttgagtttatttgggttgggtttttgcccacggagtggataaaattcaattcaaatatcctccttgaacagcatatagtttctttctagttgaatgatattaatagtgattattataataaatactgctgttattgtttcagctacaagtttttgagcatcttgtattaggcatcatgtaaacacttaaatgcatgtgtgtgtatgtgtgtgtgtgtgcatctttgcaaccgaggtactgggtaaacaacccagttccttttctgagagaagactgaccttggagagctcaggacttagctcaggcctgtggagtgaggcttagcagaaagcatcggagagcccaggggccgccagcacaccctgcttgcctacaaggagcctcctgggttttcagctctttgcctccgtgtttcctatagccagcaggtatgagaccaatcacagctgtccagcccatggcccacatcccaccctctcctttgccagggctttattctgctaaccaagatgttttctacagctcttaagatagagtgggctggaagaggaaagagttgcctggggttcttggtcaggggtctgggccttcgagcacagcctggccgcttgccggctctgggctctcacgcaggcagctcattatgaggcagcttggccccctgctctggaaaggcagccatgtcagctggatgagaagccagcagtgcccatgtgttcttggttttagaagttaggtcagcgaggtttagagcctctttaaatatttcagtttataagattagacttgatcatctgggacggaagggtggcgccccaggcccgggcttggcttttttcttcatttctttcacaggggaggtaggtgttttggcagtgcagggttcgagtgtaataaaaacctaagggtagtgagtaaatacagtgacttagagtgctgcagcaactcagagagcttactccttttatttttttatttttggaaggaattgtgagttgaaatacagcagagtggcacaatccttgtaagaacctgcccaggctttcagggaatggtgagtctctggccactctgtaaggaagtgtgttctccacctgcttgactcctctcagtggggggttgacagcagcgtcctgcagtcctttgaataggtgggagctctaccacgcatgctcaggtgtggtgagcgagcgaggccacagttctttctaatcccaggatacttcagagatctgagctcccagtgccccctggtctcctgacaacacagcaagttcctcaggttttccacggaagatgaacatgccaccaggacacgctcccctctccccagaatctgccctcggtcaccatatgaatagcgggggtgggggcagtcagccaagtgccccaagcagcgggaccctgccccctcccaccccaagtcagtgggagccccgtgtgttggctgtcatttcctgtcatgttctgtggaacatgctcactcttcatacctcttagattctaaatttcaaaagtaatttgtcactttcaaagggtgtgtcattaataaccattatttagaactgccaagtcttgtgtgtgtgtctgtctgtctgtctgtctgagttaagcacccaaaaaattggccttgctgatggcaaacagtgcctccatattgatagatctagccctccccactcccaaccccacccacaagtgagttgtcccctgtctgcctttaatcactacgagggtgggtggtgacagagcctggccgaagtctggcctcagcctggcctcctggaactcattagtattattgccaaagacaggatttataaattgagattttttttttaactgcttggaaaaaatgtctattgcattttattgttcttacaagagagaaggggagagaagaaagattttctcttcaagcatttgaagcagtaaataaagaagccgaacttcagctctccctgggtgtggaccctgagcagttgtcataaatgctgcaaagatggtatctgggcaccctggggctgggggccgagggagcacctccaagcctgcagatgggtggcagttaagagacaacattggcattcagtgcatgccaatcgcgccgtgattcttaacattaaaattccactaaagcactaataattactgttaataccgtcgagtggaaagttacagtaaaggagcagtggtagaaacagtatttaagggagagctggcggcatgagaagaatgcaaataagcgttattagcctaatgattctgccgtcgccatggttgtgcggcaccagtgttgtgaatatgtcatccagcacccgtgaatttggaaagtgtgtcaaaacacaacttcaattagtttgctctaattatggctctggagagtttgtgactacatcactcctcattaaaagagattttcttatgtggattaatgtaatatacaaaggaaagtttcaaagttcctggtgccatttgctcccatcaggagcttgctaagagcaggcctgagagacccagggtgtcctgctgggaccagatataggcaggaggtcagtggggaggctgccttgagaaagacagtgtggtgtttccatctgtcctgctgagtggccattgtagaaggaggtaggatgtccttccaaagagggtgctaagccgtttgaatctgttaggaaacgtttgccactgtggctctgtcagtctgtcgctgtgtctgagcacgtgcatggagctcagaagagggcataagcctgagtgaggatgatgagaagacatggcttggcggtgggagccttacttcccgttacataatctctggggtagaatgtaatgaaagccaaccaaagtgttttcaagggggctgaccacagagctcggcccattaagtgcttgtcatgcacgcatacagacctgagttcaacatgaaagccagatgtggagggtgccgtgagcacactacaccagaaagacagaggagcagcttgtaacttctcacaatgtcagaatttactgagcagttctgatgacggcaatttgtcataaacccaccgtccgtagtagcttgaccaaggcaaatgcaagctctctcattcctatcttaattactaatgataactctcatatcacacagcacacacacatgtctacgtatcttttacatggacatggttacagagtgaatatatgcccaaggctgcagcagggatcacaaagtctcacaagtgggctgagagtccgtgttgattagcggatgaaccagccactggctgagggagctgctgagggagctgctgggtgatgagtaactgggctgacttggggcaggtctcagcactcctccaagcctctgtctctcctctaagcagctggggagggttgagtgggggtagggtagacctgttgtagttggtgctccatcggcatccagcacccagcatgcagctcttctccaaggctcatctggatctccatctcaagtcactgcaggcctgggtcacatgctgggctctttggctttctcctctcaatcttaactcttccatacacccccacccccacccccaacagaatcagggcagaacagagcaggcggtcctcctccctgcagagccagagtgttctcgggcagggagcagctgggaaggggttaaggtggtaattgtgtaagtcttccaggctttctcccagttctacgataatttgatgaagaacttcaccctaattaaatattcaaattaggaataagtgtcaatatggcttcccattgcctggaacgatgattaattgtattcaaaactccagtggccgctgtaatccgagctgcaccattgtacctgattatttccgtgctgcatttgccatgtttttgttttaagatttaaactagtaattgatttgccatatgccgccgagctgcgcgcactttaaagctacgccgcgggaactcggggagttgagattccttagacttctatgacagattttgttttggtttttttggcttgtctagtgcattatgctctgtgagggctggggatggcccatgagggaaactcatcatataggctggtaggctggcgtcgtattgatcaaatgggtggcttggacagaagtgaacacttttgtgtttgtgcagttccttgggtaacatgttgtcgtagaaagagcatggtttcattggcagtccagccattttctttagctctgtgaccttgggcaacaccctctgagccactgtgtccccatccgtagaacactgtgaaccctactgggttgtttagagatggttgtggggcatttgagtagtggaaaccatcctactcccaggagcctacagggacaaaatctctggcatcccttccccagaaagcccttctccactgagtccacgctgtcttccagctctctccaccaggcattgcttgtgtctgtggcattttttgggttgtcactttgacccaggaatagctgtttttgttgcctgagccgtttctccccttcccaggtgaggccttgcaggagactgtcaacaggtgttggctgttgtccccaaccccctattattttaaaaccaaagtctgaaaccttatactcctctagtctttggattttagagatttttcgctttgtgatagatttatgagtgtttcagtttgtggccggtaaactcccgctgggagaacgtgcttcactctggcttcctaaaccatctcagcgcatagcacagtgcttagcaggagacctgttaaagacagatgggcagggctggtaagatgacgcagtgggtaaggttgcttgccaccaagcttgacaacctatgttctatccctggacccatgttaggagagcactgactctcacattttgtcctctgacctccacatgcacagcatggcactgacacacacagacacggacacagacacacacacacacacacacacacacgtaaaaataaacattaaaaataaccacgtggacagtctatggctcctgtgtgcacaacacttgtaacaacacccgtctctccgtggaggcctctgctcactaggacagttagaaagcttttgtgataagtataaaagcacttgcctttgctggtgtggaaaaatgtcacatcagactataaaaaacgacagtggcggcggctgggaatggccttcaagagcagtaagagaagaaaaagcacaacagaaaacaagtcagggcctgtagctgctgaaatgcggccattctgtttcccaggaccggggtccaagaatgaggagcctctggcttcactgggacgcttcagagctcagtcctagggtagggcctccgaggacctggaagcaggagccattctgagaggtctgagaggggtctcatgcaggccaggtccttgcaactgaaatgatgcattttaattaacttcagggggagccggcccctgagcatatggtccttaagaagcaagggtccccagactgtcagcgagtgtagtcactgaccagggaccttcttctgacaccgtgaccagcttgtagtggggatactccaaaaggtgctgattaaaatgccagcaggtgcagggaaggcccgtcactgtgactcccgcaccctgctcgcaccaggtgttttctcagagcctttttcttcattaagtggtgttcattaagcacgtcctcacacctggtgctgaggctgtgcatcgcagccgacttcttcccagtggtgttttgcaggaataaaagggaatttcatttagccatttgccaccccacccccaccacttcagctcggctgccattgcttttgaatggtccttctgctgtccccaaccctccttcttggactacccgagatcacgtcccacacacttggtgtagatgatgagacagctctttcacaccagtgctgtgctgcaggctgtcccctgtgccatctctgagagtctccccctggctttgccattgtcaactttctgattagaagggaagcaatgtttcatcagaacattagcaatgaaaatcatgaggtgcatggggtaggtgcatccgccctcccctcagcgtgactgctgatgacaccacagtcatgtcccagagctggacatccttcaggcttgttggcactggccctgtgcacaggaggaggctgtccctcagggctggctgtggcatgctgttttggagctgtctaacagctgtgttacagaagagtacccagctcagctgtcccttctacttgttccgcccctggcaatgttaggaggtcatcaatgctgccccatttttctgcccaaagccccagttcctgccagctgaggttctgttccatacacaacacttccaccagttcttcagccttcccccagctctgacccccccctcccatggccactgctctatgtatgtataactctttatggtgatcttacagtgttgtcttcagatttttgtgaaccttcataagcagtgccgagttggcacccaagtccaatctccagcaaactatgtccccacctgcatagctgggtacccgaggaactccgcaggtacttctgcaggctgggcagcctcagcacctggctaccagcaggtagctggtttggggattttgtactgactttccaggtagagtctgtgaaaatgtcagctagccatatttcccatctaaaacacagcatttcccacgtccctctctgtcctcatggttccaaagagaatggctaagctctagtctatctaccctgtctgcttcccattcctaagcctgaaatgaactagagcatttcccccagaaaatatctcactctgttgcccaggttagccctgaacttctccagtaatcctttctgactcagcctccttagtagctggttagcagctacagttttaatgcacttattccagaaaaagaggcggccgtgccttctttgttgtcttcagctggaagtaaaaaggtttctatggcacaactctttatcttctaaacacagggtgtctatcatcttcagaaaagtcagaaaatgccatgggtattttccaggactcactcaccacccaagatgcccccactgcctgctctggggttccgggagctcccttgtctttgcttacttagacaggagagcggccgggctttgttgaagtagaatgtgcatgttgtaagctgtgcatacttcctatgctttgcaggtggatgtgtgtgtgcacatgaggcattcgacaaaccaaggtcttgagcgcccctcccccccatgtgtctgtaaagagcagccactggtctagccctgtggagtagtttgcattccctagaatattctagaaatgacaccatagtgtgtattatttttactcaatctagttgcccccaaattaacccatcttgcatgtaggtagtctgtccctttttgattgccgagtttgacacagtatgacaagtcactctccagtcacctggcattgtacatctgttctgttcttagtattgccaaataaagccaatagaacttttgtgaacgaaccttggtatagaaacacacttctgtttccttctcttgggcagaagtctcttgggttgtgtgagtggctgtacttgacttttaaaacctgacctgagctgctttctgatgtgggtttgctgccgtgctcctgccagagccccctgactgttctggctcccctcatcctcaccaagcattgacagtatccatctctgacatcatttcactctggaaggtggaggggttgcatttcctgtgatggaaactcacatggccctcccaactcgtgatcgagtcttttcacggggaatttgctcctcgtgttttccttagggatgtgtcagttccagtgttgtacccacttccgggctgagttctcttctaagttgtaagtgttctgaatatgctcatgtcagagtgcagcgtatgctggtgcctgttttctctgggtctagcatttattgtcattttaaaaatatttttattagttgtgtaatgatgtgtataaatacttttgtgtgtggtgtgcacatgtgagtgcagatgccttgtagagtccagaagagggcattgtgggccctggagccagagttatggatggttgtaagccattggatacagttgctgggaatgacactcaggtcctctgcattcttaactactgagccagctgcccaggtctgtgtgtagtttgtgatgtcgtgtgtgtgtgtgtgtgtgtgtgtgtgtgtgtaaaatatttaacccaggctggtctggagctcatagtgatcctcccgcctcagctttctgtatgctaggattataggtataagctaccacacaaggcttagcttatgctttttaatatcccatttaaggaaagtcaaatagctcaatattgtggaagtgctgggacctggcatcccacttgaagtctcaggaaccccttggtctctgaagcacacactggaatctggtgcttcagaaggtgactttcagccctgggagaacagaacgaagagacccttacgtgtctgtacaggggacacaacacaaaagcagcagtcctctccaactgcaggttagccacagccccccttgctactgtcccccacaagacagctgggtctgctgccacccagcagagccatctcccttccatgtgaccatggggtctgaaagattgatggctgcatttaaaacattcgcacagacctggaatcaacactagaaaatacagatttaaatgagcaaggaaaaggcagaatgaaaggaaataaattgtgctggcaactactgtcacgtaataaaatgtcatgtgtaactgaagggcttttgcacagggctgtgtgaggcttagtggccatgttaattgaataaggtgcctcatattgactcggggcaagaatgaaatttcccttagcatctatttagctggagttgttgttggcagcggcctgatgctcatctgttacagaactcccagcccctctgcactgatgtaacggctccagaagcagtgtccaccccggccctgcaggtatggcctgtctccccaggtatggcaggacctgacagggcctgaaggagcaaagctggacacaggctctggagggcttagaggctgcccggatgcctttccataaaccagatgttggaaaaatggttccctgaaccaagtagcggttgttgatgactgatgatccctaagattcctaaggagaaggcaaacagccctctagctttcctggtgttaggggatctctccatagtcactgtgtctgcccatgaagtggtcacttgcagcccactcttgtgatcccctgtttctgttacacaataggcaccagacacagttacctcctcggatatcttggtagtggttgaagctgtgcagcccttgacccagcttcagaagaagctgtgatcagagcagcccctggaacgttctgtccctcccatcgctgctgcagcacagtgcctgccttgatctcacctggatttggcacgttcttggggctggcaggttcactttcaaatgtggaaactcgatttttgtcctcctcctcgcgggtgcttcaggtgccagtgtggtctgtctagcagtctcctatttcagcatgcagttgtactgcagctgcagctgtcccccagtgtttgatatccgtggctttataagccgtgccacgaggagcgtgtgtactgtgtatctgaagttttccttgagtcagagggagcgacattttccaaaccattaaccagcccagtcctgaggaggcaggtgggaaggcttgctggaagattcccaaaatcatccctaattacaagtcaaagtcaagtgtattcattcagcaagtcctagacacctttacagggctttgttctcagcactggggtggtgagaggagaagacacggtgcaagtcaagctctgcccacagagggaggctgtgcagggagcaagctgggctccttgaattagaaaggagttcttgggggctggagagatggctcagcggttaagagcactgactgctcttccagaggtcctgagttcaattcccagcaacaacatggtggcacacaaccatctgtaatggtatccaatgccctcttctggtgtgtctgaaggaagtgactgtgtactcatatacataaaataaatctttaaaaagaaaagaattcttggggtgggttatctcttctagggtgatcaaagcggctataggtgacgcagcctggccggctataggtaaggcagcctggcctacagaagcctctgcagaggacggagcaagtgcagaggcctggagcagttctgaaagccacagggacagggcacaaaaggctgaagctggaattggccaatgtgggggtgtgggctgggctaagccgacaagacctcacagccatgggattcagtttaagacagaggaaattccccagtgggtttgcattggctccactctcaagctctcaggagccaggctctaggatggctaaggaagaaagggttgattttgggctcacactttgaggatatagtctatcctggtggggaaggcatgaggacaggggctgaggcagctggtcacattgtgtccacagtcaggaagcgcagaaagatggcccgagcgctcagcttgcttcctcctgattgtttgggcagggacccactgctgtggggcgttgctatagggcttcccaactcagcctggtctaaaaactcccgtcctgccatgcccagagacttgtttctgtggagattctaaatcccaccaacttgacaagatcaaccctcgcgccaacttaagggttcacctggttctaacgtgacacttgtttgcatcacgacctgtatctgctggcagatgacatgtctctccagaggccacccagctcccaggtgctagcattgagactggatcccatatccagtgagtgaactgtggagggcagtgtcctcacccacagagggccaggccactagctgtccacctgtgtaccgtgcactgccgcctgctggggtgctatggtaggttgtggcagagatcttgaatccgctgggtcactggcttcagaaaaatggccagggcattgccacccagcatgagtgacctctctctagcctaggtccaagatctgaggcagcatagctttaaataaagttattgccaccaggagatttagggatctgtactctcgtttccattcttcctggtgtttctgttaggaggcccatctcctctctgagtcaccttctctggcagggttaagcactgggtatgaggctggccaccctatgtctgacaccaggaactgcagttgaaacttgcttcagcctcagctcctctcacctgagcactgtggatctgtggtcccagccccaggtctctgcttccttcctaagagaagaggtgccagaaatgtagaaacttgatttccgtttaacacttgcctgctgagtggctccttcctcaaagacttaggcctctgcctgtgccctcttatgtccatattcccatgcccctcatgtcgcctcatgaggtatataggaaccatcccttccctccccaccccaccccccacccccgtgagttcctggatgttgtggccactgctttcttcttccttcacccacctgcttctctctgtggcagagaggcctggggcccacaagtcccttggggaaatgctctgtagtgagctgcagtgcctgagccagcaacacttgctgccacagaaagaccaagaggattatacccaacacttgactgggtcaacagcattcagtaattgtctgtgacagaaactgcctatgtacccctgctgttgtgttgacatctgtcccgctgctgagcacaccccagagagaacatccacaggcggttgggtggccttgaggcacgagtgggaagtctatggcgactgccccaccggcatctttgcattaatagctggttgtagcctacacataggcaactgaaccgcccaaggcagcccgggcaggcctccaggaagctgccaatgctcctctactcccagagcggctgggtccaactctccccattgtcccagttcttgccgtgttgtctgaaggcagccatgagcatgctgagtgggtgcttgctctggactgaagctcacttccacattctggtcacaagctcatagccagccttgtgggcctaggggaggtgctttccatgaggacatactgtgtgctgtgtgccagggggtgcaggacacagtagctcaaagcaaggtgccatgctgactgtcagaggtcgctagtccccaacctgagagtgaaatcctttccaacctgtggtggatgtggacgccactcttcccagccgggttgtcttgatcatactgatgtatctatcccacactaagctatgggttagactgctgatctctgtggaataccctgtaggatggaggaaaatgtctgctggtttcttggggaggtcaagactgaggaagaagatgggggtctactgaagcacatgctctgccactccagaacgctgctcagtcatggatgccatcgtgtgcttgctgaggctaggggccatagtacactctttgtaaccacctttctccctgtttctctcaggcacatctccctaacactaccggctaccttccggggcagaaacaacaccagcacagactatgagtaccagctctccaatctatatgccatatcaggtatgcgggccaccatcacaggccagtgcagcactgtgcatctcagtccccagccatggtctcctccctgcagaacctggctttccctttcctttgtgttggaacttaggccaatggtatgtttggaagcaaatggggtgcagtgtgttcgtttctcaggttgggggcacgctcaccacaaccttcacatgccagcaggcaggccccactgaacacccagccctgcctgccaacgtgtgtccctgcctgtcctcaccttagtttctcacaggcggtgtgtgtccagcagggacacagcctgttcccctcgcacacccagagtccatgtctgtggtttctgaactcagcctggaaaaggatagtgttcctgtggcaggaacctcaccagggaggaggaatggggcagcctcactgcaggacaaagaatcatgaggtgtgaggccatacaggtgactgcttagagcccaggaagcccacaagcacccccatcactggggaacacggtaaatcggcgccacttagcagcacacatccttaatgctgagtgacatttcgaacacgggaacatgacacccactcatgtcccataatgaatcggttatttaaaaggtaatctctctctcttttctaaaacctgcaacttcgggttactaaataggtgagctcccactgtggggtaattcctgccagtgtgcgtgcgtctcgttacgatcgctccctaataggtttggaagtgaaagctcaggcagattgttccagttctgggcggcactcctgctgggaaggggggagccccgagttccagctctggctctgctctggaagccagggcagaggagggaggggcaggtcacgtgtgtctaaggaaagtgtctctggggagcacggcttccatgccacgactatttcaggagagtcgtcaggggaatgtaacaagtgtggaaggatggcatgttttgtagacaagctgatttatttcccagatgctcagtgtcagaggggtgcataacaggactgtgacgcccaggtccacctcccgcagacaacccacacacacacctcttctcgtcggcagcttgcacatcttacagctttggcactgggcagcacccaccatccctgtgtcctctgatggctttcccagctgttgatgctgcctcagcaaatagcccacagggcacaggcttcgatctggcagatgtgatcgtctgctctggaccgctgcttccgtagtgcagtgttgatgaagtgttgactgggctcatttcagctgctggtttagcaatagcaaggtaacagtcttgggacacaggggaagtgggtcagaacttcctgtcccatttatatccatgacaatctgtgggattttcatcttcagaggtagttgaggctctagctcaggccacagacagctcaggtctcctcagcagctgcaggccccaaatcactctgctaggagctggttctcatagggccaccagaaataccctgcaggccctcagggctccagggaggtctgcaggctcaccatggcaactggtggagtggggactgggaaattcatccatccccttccatccccccatatcgtctgcccacctctgtcttgttcaaactcaagggcacagagaccaccctgtctctgccacccacatgaactctatctggtatcaagtggcacacatctcagtttggcataagataagggtttctagaggtttaatccaaaaacctcttaaggtgacccatgccccaggcaccaagccccttgctgactccccaacagtggaagtgctgaaaaccatgacatgactcgtcagaccctctcctcccagccaccagtgcagatcgcagcactcttgaggctgagccctggtgcatgctttcggtgtttcctgaagatagccatagccatttgataatttttggccctttctgagataaggagctgtgggaacagtgtgactagaaatgtaaaatgcagccctgttgagtaagtgtggggatatttactttccaattcccttccctgagccacgcctctccttccatcccagagcctatatcagagctcctgtggcagcagaagagaccatacagaatgctgccagacagacttgttgagcttgcatctgttctgcccaggaacaccagacaagtccctcattatgtgacctgctacctgtatgtttccaaggtcaagggccaacccctctgccagcttgttccctgtctgcggcctcctnnnnnnnnnnnnnnnnnnnnnnnnnnnnnnnnnnnnnnnnnnnnnnnnnnnnnnnnnnnnnnnnnnnnnnnnnnnnnnnnnnnnnnnnnnnnnnnnnnnnnnnnnnnnnnnnnnnnnnnnnnnnnnnnnnnnnnnnnnnnnnnnnnnnnnnnnnnnnnnnnnnnnnnnnnnnnnnnnnnnnnnnnnnnnnnnnnnnnnnnnnnnnnnnnnnnnnnnnnnnnnnnnnnnnnnnnnnnnnnnnnnnnnnnnnnnnnnnnnnnnnnnnnnnnnnnnnnnnnnnnnnnnnnnnnnnnnnnnnnnnnnnnnnnnnnnnnnnnnnnnnnnnnnnnnnnnnnnnnnnnnnnnnnnnnnnnnnnnnnnnnnnnnnnnnnnnnnnnnnnnnnnnnnnnnnnnnnnnnnnnnnnnnnnnnnnnnnnnnnnnnnnnnnnnnnnnnnnnnnnnnnnnnnnnnnnnnnnnnnnnnnnnnnnnnnnnnnnnnnnnnnnnnnnnnnnnnnnnnnnnnnnnnnnnnnnnnnnnnnnnnnnnnnnnnnnnnnnnnnnnnnnnnnnnnnnnnnnnnnnnnnnnnnnnnnnnnnnnnnnnnnnnnnnnnnnnnnnnnnnnnnnnnnnnnnnnnnnnnnnnnnnnnnnnnnnnnnnnnnnnnnnnnnnnnnnnnnnnnnnnnnnnnnnnnnnnnnnnnnnnnnnnnnnnnnnnnnnnnnnnnnnnnnnnnnnnnnnnnnnnnnnnnnnnnnnnnnnnnnnnnnnnnnnnnnnnnnnnnnnnnnnnnnnnnnnnnnnnnnnnnnnnnnnnnnnnnnnnnnnnnnnnnnnnnnnnnnnnnnnnnnnnnnnnnnnnnnnnnnnnnnnnnnnnnnnnnnnnnnnnnnnnnnnnnnnnnnnnnnnnnnnnnnnnnnnnnnnnnnnnnnnnnnnnnnnnnnnnnnnnnnnnnnnnnnnnnnnnnnnnnnnnnnnnnnnnnnnnnnnnnnnnnnnnnnnnnnnnnnnnnnnnnnnnnnnnnnnnnnnnnnnnnnnnnnnnnnnnnnnnnnnnnnnnnnnnnnnnnnnnnnnnnnnnnnnnnnnnnnnnnnnnnnnnnnnnnnnnnnnnnnnnnnnnnnnnnnnnnnnnnnnnnnnnnnnnnnnnnnnnnnnnnnnnnnnnnnnnnnnnnnnnnnnnnnnnnnnnnnnnnnnnnnnnnnnnnnnnnnnnnnnnnnnnnnnnnnnnnnnnnnnnnnnnnnnnnnnnnnnnnnnnnnnnnnnnnnnnnnnnnnnnnnnnnnnnnnnnnnnnnnnnnnnnnnnnnnnnnnnnnnnnnnnnnnnnnnnnnnnnnnnnnnnnnnnnnnnnnnnnnnnnnnnnnnnnnnnnnnnnnnnnnnnnnnnnnnnnnnnnnnnnnnnnnnnnnnnnnnnnnnnnnnnnnnnnnnnnnnnnnnnnnnnnnnnnnnnnnnnnnnnnnnnnnnnnnnnnnnnnnnnnnnnnnnnnnnnnnnnnnnnnnnnnnnnnnnnnnnnnnnnnnnnnnnnnnnnnnnnnnnnnnnnnnnnnnnnnnnnnnnnnnnnnnnnnnnnnnnnnnnnnnnnnnnnnnnnnnnnnnnnnnnnnnnnnnnnnnnnnnnnnnnnnnnnnnnnnnnnnnnnnnnnnnnnnnnnnnnnnnnnnnnnnnnnnnnnnnnnnnnnnnnnnnnnnnnnnnnnnnnnnnnnnnnnnnnnnnnnnnnnnnnnnnnnnnnnnnnnnnnnnnnnnnnnnnnnnnnnnnnnnnnnnnnnnnnnnnnnnnnnnnnnnnnnnnnnnnnnnnnnnnnnnnnnnnnnnnnnnnnnnnnnnnnnnnnnnnnnnnnnnnnnnnnnnnnnnnnnnnnnnnnnnnnnntgcgactggcagctgcctggcagtgggtgctgggtttggctctaagtcttggtaagattgtttcgggggggtgctaggtgctaagtatcctttttcttgatcacagagaatagtctttcctcctagaacacaagtggaagacaactccatgtaagcagtcctgaaagtggaatggaatgagcagagaggctgtgggtgcgccctgctgcagccagccctgtctctgtctgctctgtgtgagacgctccaggtggataataatcccacagatacatatggacagtcacaggtccacctgtatatggagagagaactgtaaatatttacattcatgggcatttattctgttcgtagcacacccagctttctgtgcggataatggcgtttgatgagaacagtccgtgtggcctgggtactcagctggccactctcagctgaagtggcccgcattactggagatcttggtgagaaaaaaatgcacctaggctgtccctcctcagctcctgctgtcacacactgtagcagaggactcccgagggaagggtctccatgccgtttcctaacccagggtacttcttcagccgagtggcagatgcacttaatgactgcgcctccagagcagtggagctgggcgcccaggcctctgctgactgcagttaggagcttcacgaaattgccttttcaaaatagtttttgaaattaaaatataattacagtttctcccttctctttcctccctctaattgccttttaaaccacagaaaagtttttaaaatcttttgggggggcattaaaggtataaaaattaagcaaatacaaatgaaaactgtcaagtgaggaaagccacacacacacacacacacacacacacacacacacacacacacacacacctctggccccaagggacaccactgtgcagaaacacagggtccttgtcaaccccctcccccccaggcaggtggcccagtgtcctgatctggcctgggtcggccgctccatggctttgactccctactccctagtgttaggtcccccacaaacacccctagcagtctctgattgctcaagccacatcttcctggcctccatggctgcactctgaaaaaccagatcctcttaagacacttaatgccgaggacggctgaaggtgcttgggttgaagtctgtcctcttgtcagggcagacaggaggacacttttctctgaagcagagatctgtggatgagctgaggaacgctggcttgggctgcgaaggcacgaagcaattaaaaataattaatgattcctgaggatcagcctttctccatgcagttttaatccagttctcatttaaattggaagatggacatttaattatcagtattatgaaactcgtgatttatacatttcatccaatgggataaaatttctgccagcagctcttcatcttgtggcaaagagtctgtatgtcttgtgaggggcgggggacatactttatggcaaagagactgtgtgtctgggtgggggttgctgcttgtttgaaaccttaccagctgtacaagcagaacactccaccccaaacatagttcctttcatttggagtgacttgtctgtctgtctgtctgtctctgtgaatagagaagtggatatgattgctcatacctgcaatcccagcactaaggaggccaggcaaggatcaggttgctgtgagctccagctaactggagtgacacagcttgactcaaacgaaacactgaaaacatgcctgccttatgcctaccttgtgccttagtgaagcttttcaggctgggatcgagagaagtgaggctcagatgacagggcagcccagatgtcctgtggcatgcagataacgcttggttccacttgtggcatgctgtgggtctcctcctagttcaaatatgagctgagtggttcactaatgatgtccactggatgctgcctctgtgttccctgtgtccctgtggccttcatctctcgtggacatgctgttgtggcctgaagggatgttgcatttcccagctccgctttcctttatctattggagcgctggggatacctaggacgacttagaaagctgttaggtgcctagacacacgaatgcccagcagggagaggcgacttgaaccagccacagagtgcagtgtgggggacattccagaatgcagtgaaagtggctgacctgacagcagtgctcaggtccagagggaagtgagtggtggcagtggtggcagtggtggcagtagtggcaggggtggaagggacttcggttaccactgtgggagctgtggctcaccttgtgtatctgttgggcctagccatgactggcagtgagatcaagtctacagaaaaatatataataaggataagaagagctgaacagaaggatgggaattgatcacccagcatatctgtagatcctgatgtagaggggtggctgacaggtggccaggttcgctctgtacacaaccatgtgtgcgctgtcaggcgcacgcacactgccttgtttcgattgatgaattgcctgctttcttgattaaaccttccgtcacttaagaaacaaaaagcctgtgtttagatggcagagtgggacatgtcaaaaaaatctgtctcctttacctttgtgcagatgtgggcacagactgtaacatgtattattaaaatgaatgtggcatttactgtgcattattccttccctgggagaaaggactgtaaattatatgctaataataagctttaaccctttcgaaatgcagaaagatttaagagtgcaaatcctcacagaggcctggctaattggatatgcttttgtacattccccgtggccaccgtgtcacaggagttaatgaacactacgcataggcccgttcacaggggcactcaagagctcgagccagtgtctctgcaaggctccacagaggggctgagcctgacaccctgcccgtggcccatggctggaccgtgccctatgaatcctcagctggaatgttagcatggcccctcctcatttactacaagcccacttggctgggcttgtggtctagcccaagcaggtgcctagacacacgaatgctgtggcttgcccccttgaccaaccctttctaactgtaatgtcctgctgtcccggtgacaagtgcttcctccaagcacagcctgagccttcatctgccggtcagacctgcatgtctcccatgtccccagccatgagtgactgcatccttccagacctctcctgcccagatcaatctgccctttgacatgtcgcacccctgtcctgccagcctgcgtcactctctacgtccgtgctccactctgcttttgcatcaggcacagcaccagttccacctaccttgcctttcagtagacaagggcctgtttggaagcctgggggcgggcttctctgctctctaagtcaggaagatgtgggtaacacagcccacagaaggagcaaggctaagccgctgctcattcagcagactccggggcccatggcaggctctgtgatcatcaagagacctgttggcaaaggctgtcacatcatgctcagaattttgacacatgctacccagctttcagagagaaatcctgggtgcagcctcccaggttgtacactgcacagtgtgcatgagtagcatcccctagaggcttgcattatgctcaggcaggtgatacattgctgtagctactctcacacctgggaaagacaaggagtgtccagcccccccccccaattgctgggaggatccagggcttagtaaaaacagtttgcaaggcaggaggtcttgtgggaataggggtgctctccatactcactttctctgctggacatgacctgtggaggagcccaaagatttgtggggagtcctgactcaggacacactggcacatgcccagcatggtcttcactgcagccttgtgctccctcccagaagtctgacggatatggtcacttctgactgttagggaagatttgttcttccccaccccagtacagggaaacggcagtaaaggctctgcgactcttcagccagcatctctggaagccgggaagccgaaatgcatcatcacttacaagtgggctgttttctgtggcagacagcccacaggcccttctggggaggcgacaggatgacggcttaggggcaggaaagagggaagtgccaggcaggcagagcctgccagcagcatctataaaatctttctgcatgtgcctttggtgtctgcaggaaaaatccttggtggagctgatgactgccggggcctttgtgcgtgctcctactctctgcaggtgggggagcaccaagacctattccagtttagtcattatggaaaattaaaatattatgaggtgacaggtacttcagagctcttaagtaggtggccgactcccactgcgttctcggtctgtatctggcttgaaagcctggcagagcttgagcagcaatgccttcaatccatgggtgaggcagacaaggggccttggatggaccttgacaggaacttgcagatcaacttcaggcccaagtttcccacctgagcagcacctgagatgccacatctcccaggtcagtttggcaaaaacaactgcagttgtttgagacaaggtgtggttgtacccccatcagggccacaggtaccatgtatacatgcagctcaaggtggtccaagatcctgcctgatgctatgtatctacaggccctagacctcatgggcactctgtttagacagcaccttgacagagagcaggtatctgggcactccctcctcccactgtgttcatcttctcataacttccttcctggcagaggaccccattgcaggcctggcccaaagcatactaataaccaaggaagtgtacttaaccccagctcttcatctgctcctgacacctctgctggggctgctctggacactgctgtctgcagaggcttgcgtatcaagtttgccttttgttctgttctccatgtatgtgtctctcgcagtaatcaaccgtcagctgagaggggaggagaggatattacggtaatgtctttcatttaaacacatttagggagctaaaatagatgacacctatctattttattaaaatagatcgagttaatagaaataatgtatttaattatacccgcccttccccgggtggaacccctgagtgcactgtttgggccttttgtcactaatgtaaaacccaagacaattctaagtaggagaaggagtttagagagatggacccgcccagcactgcacccagggctgagatttaaattcaggtttggacatcaggccctgaggccgtggctcttgttcagtccaggctgctgtttgtttctctccctttgtcagcctgaaaggtgaaagtgtacaagcccaaatgattcacgaaagcacccaagtgtcagggtggccccagtgctctggaaatccctactgcctcagcctctcagctctcattagggagagagaggccttgaacacatggctgactaggatctctaagtcccaagggcgtcaggagcaggcaaagactccacaggggtgttgctgttactacagtactccagacccattctcgggtcttttttgggacagctaaggggatgaaggaagcacctccaacaaccccttatcaggagtggggccgtgcgagttgtgctgtgtacatctttgtctcccgtgctgcagtcttccctgaaccttaaaatgatgggaggtggccaaacccaccatgccacatagtggcattgaaccctcagttcctttccctgttgtgagctttgtagctccatgagttcctgtgtctgtccaccagcatcaggtcccatctgagctggggaccacctcagtgtcacctgcctgcccttcctcaaagcttcattctctagatcagacctccaaagagccagggatggtgaacagttgcagctctcatgttccagccacctctctgcagaggccctagcctaggacccatgatctgccagcccacgtcccctctgcttcacactcctctctttctccatctgcctggggcctggaaggtacggggctcaggctagcatcttgagatttaccaggcaatgattcgacttcacaggggtgggtaatcagctcagaagctgcccagtgtctcacaccagagtgccctcccttctctggggacacatgcatctaacttctgacagcagcacagaggagagcccagcctatttaaggacagcagagctaactttctcacagacagagcacctgagtctacccctgcccccacctcacctcatctttccttcagtgctgccctgcatgccccctgtgcttcccttccttcttagttagtgccggtgatgatcctaagcctctgtgctatttactagagggaaagaaaggagggagggaaggaggggagaaggagagcgagagagagagggagaacaagcctttggtccagcctgtgtttggatggaattatttgtcacatgtcacagagaatgagactcttcacactcagatttgtcttagcatcatctctgggatggtgaatgatgccaaactttcctccaaggtgagatcctttgttggcgagtgctttcttttacagcatgagcaatctcttgattcactggcaaggcgacatccataatcttgaatgagggagtggagcttacctcgctggccctgtgcatcactctggtgacacatagaggcatcctgaattgctcactcggtagaggcagtgaacacactgggcttttacatgccttgccctgtgtattgacttcagatacatccagtgccagcagaactctgtccttagagaagatctttgtcttgaacgttgcctggtccccaactcttgctatttctgccaacggtcctgtcacctctgtagactcagggcaggtggcttctgtggccactgagcttcctggttacatacgtttcctggacagcttgggcattgtgcttgactgcccaggtctaaggaaggagttctacctttagctaacgggtcttgttcagggttattcaggactgcaaagatagttcagagtttatgtgaggacctgagaccaatccccagcacccacagacaaaactgggagcgggggctctcattaataatcccggtgctggggagacaaagacagaggactctatggtgctcggtggccagaacctagcttagtggagagctccaggccaggaagagactgtatcaaaaaactgaggatagccttcctgtgtgatgacacctgaggctgacctctgacctccacacacatgtacacacacacacagagtagttgttttcacagccaaagttcaggattcatttaggataacaaaacaaaggcatctcatttcccagtgtgccgagcacccagccaggaccaggcatacaggaggtgctcaatatttatggtcttgttccagagaagaactggttttggggccattcctgccttgtcgctgacctgttcagatgtgtgaatagagacgttttatgtaatatcatttccattatctcttttgtaagcttgaatgacaccttctcttctgtttttagcaaattacaaataacacccacaaagggcactccagataccatatgtacctttgacctgaaccagaggtcctgctctctcttggcctgctatgacctccacaggctgtaaaggcagccacgaataggccctgactggattccgagtcttactgtatcttgcaggcaaccctccacttcctgcctttagaagccactgcttgcttgagatccagtttactgggtgaaagatgtttggaggttccagggttgtacagccttgggtcccgtccctccttccctgctcagctccagtctgagatgcgatcacatgtgaaggcaagttttcttctgctcccttccttcccagcttccctgccctaggccccttagcaaaacagcatcagcaattatacaagcccccgtcctggctacaggaccacataggagcaacgcctatcatgtcacagtcctctgagggcaccacaccgatgcgtccctgtgtcctctcacttaggaagaggacatgcaccagtgcccatgcaggaggccatggtcactatcacaggtgaggccatagaggctggggcggctcattttctcaggctactttttttttttctttttaagatactgtgccttttattttgatttaatgaggacagacattttaatcagaggttagtcatttattgttgcaaactattgttttgattcatcatttttgcagataattaaatggttgagttggcacagtgtgtctactttattaaaacaagtaattttgggggggaaagagatgctattttttggatcactgcacaagaattgcttttatcttcatctctgaacacatttttcggctattgggcagaaagctctcgtgttctctctggcctgaggggactggccttgccagattggatgttggccactctgccctttgaaacgagagctgcgatgtaaatcctacgttctcaccttctcagaagacctgggttttaattggattgggggaaagagcctacaagttatgaactttgctgagcagcagttcttaattgcagccctggtggtgggtggagtttaaaagtcaattactgcttgtcctattatactttacacacctaggatttgagaaagtctgccacttagtacagaaatgaaaaggttactcgcactggttggcacgcacctctgagcctccatttgtaaatgtgttcactacatgtatttgtgtgtttgcaacttgtagcttggggctctgtccaccagcgtatttctcacggggagtaacctttcagacgggtccttcagggctgctcggagcagttttgcacacagtccttcaactggccatccagtgcacttgcaggtactgtggctggctggcaccgaagaggccgcagatcactctactcgagggctctgaactagtcagggaatggccctttggggtccatttttaaagaacaaattgctcacaacatttgctttctttgattttcccatgtttgtgtcccaaatcagttaattcactcattaaaaggatttattttgggtgtaccaattaaaactttggaggctaattttttgctgagcagtgcagacctctgaaagcacaatttataacagtttctgccgttttccacagagagccgcctgcaaggactgtaatcccacccccacccccacctccaccccatccccagctgataaaagtacaaaatcacttggttctttgtcctgcagctccaggctgctgtgtctgctgatgacggagcccagcccaccctttgttttaaggtgcactcccaggcggcacagtccagcccagcccgagccctcactctgtttgtttgcttgcaggaagcctatagttaatttttttaataggaagctgctgtgtagtttggatatttaaacagttattaaccgaatgacaattaacagattgcatagacagattttcttttgaaaacctctgaaattgagtacagtttgcaaaactatcacggcatagtaatgacaatgaattttgatttcccggaactgatattagactctttattaaactatgtgcatctgcttttaatttactccaaataattggaaaatgcaatgaagctttccaattaaagcagggctttatgctgtttaataataccccataatattatagcttacgaagtgacaggtgagctggcgtatgaataaaacataaaggcagcaatgagggacagaaaaccagagacagttgtggggattttaaatgctggatgtaatttgcatatattaatctcttcttttcagccttatcaggcgttcctcagtatttgaagttaaaatagcgttgacaggcgagagtacgcttagttttttcaaggatttattacttgtataatttctgatctttaataagcagatatgactgatcctcatacttctatagaaatcggttaattgttccagatggcgtgtactgattatgcaaaattacttttcacaccgtttttttttttttttgtgatggagtttggagtaaaattaaattttttatagccttcttatcatgctgttttacagtggtttttccacagaagttgaatttaatctactatattacattgaccagcacagttattctaatgtagcgttttgtgatttgacaaagaataatagaacacattgctcattgttcatcactgtgtccctaataaaaaggcgctcctgtacatggagcgtggctgttatttatgaagaatgccctcgtttgtgccgttaaaaacgcaaaattgtattgtggagtagtttctttgggggagaggcaatctggagagaataagtggaaagaggcttgttgcttccggtttccgtgcagggggaggagtccttttaatgactgctgtatttgaattgtgttacttttttctttcctggggtgggggtgggggctacataatctcgttctattaagagaagtgccacgggttgacttgtcttgatttacataatcccagaagccttccgtaattgaatagtttgcataaaaggtggtcacacttggtacagggcatcaggaagaagagaaacgcatcacgcatcacacggtttacttctccaagtatacgcttattgccaggcacgcgagcaggggtcaggtctgagtctgagttgtcctcactcccactgatactcagggcaagcagggtgtgagacaccccacagactcagcctagaagagccctgaagtcaattccttgattcaagggtcattcgggtggctgtagacagctttctttttttgcattaaaattcttcccttttggttagggccagggatccggtgtgactcatggcagagccatgacaaagaagaaatctcattaaactccatagcattttaaatacagtgtcgatgatcgatgatcagaagttcaacttgtcctcagaagagatgcctgtgatgttcgtagtgactcacctctccaggtgcagccagcaccacagccacgccacatcgtggaggccgctctcttgtctgagcagacttggagacaatttggtctgattgagtagtttaaatcctgacagccctggggaagcaaacccttttctttaattttcttgcagtaaccataccaagtgctcttcattgggagccctggcatggaaacagggcttcactcacatctccacaggctttggtgaagcaaaggcaagcagaaggccgcagaccccacgacagagcgtgcccatctggatttgcaggggagcactagacaccagcagtgagagccctgaggaaaagcaagggttgcctagatacacctgtcacctgtgcggcacgcacgctcagaaccctgtctgttttgctgattccagccttcagagcatgattgtctgacttctgttttcactctgatctgaaggaaatttaaagtaaaatatctgtgacttcaacccagaaagccacacgtggaaataattcaaaacccgagtggttgcatttgacaataccgagattctgtctccatcttccttccacagtacttccaaaaacttgggatctttcacatacactttttcgtaaactacaaatgggttttttaaacgaaagttatgcaaaagggggaatgaataaatcagacatgattaaaaatatttgttctaatgcagtataatttggtagtaatgtgttcatcgggatagcttacggctacattaagtggacagactttatatggattctctaattttaatcttcaaaatgctatctaatgtctcattaagacttgcatataatgtatcttaagtacagtcattaaatatagtttagggagatttatgttcagatactgcttaaagatgttttaataggccatttactctgatgatattaatgagctcttaatccagatgaagcttctcaaactagtgggaaagactccggcccgagtttggagactggggattgatacctgctttggacaagtgcccagagcttagccccgctgacacttggtgaccccacttggcaagcctcttgccaaggcctggtgtttggaaaaaggtcttccctgttcttgctgtgactgctgtccacggtgacacacagggacagtccctttgctcccccaaatcacgtgcaagacatgcaggggctaacttggccaaacctttcatctccaaggtcatttgcaaggaccccagtgtcacagggagaatgagggttaaagaaagttgtcgccacccttgttgtgggagcatctgccaggtgaggctgcacagcctggcctcctgaggaacagcctcactccactgtgagcatgctgtaaagggtcacatggctgtgttgccatctttcaggagttcaatgtggctgaaatatgcataataaagtagtcctgctaattcaaaggtataatgggaggacaccctgtgagctggtgtcaccaaagcacaggcatggtgatcccagctccacctctaaagatgcctcgcgaggccgggcagcaccagagcgtatgcacagtggttcccaagccccatttcaaacgtctctgtgttaccccgtctttcagagaattattgaaaagtacagtttttgtttcaattatttttttaagcaaaaggggaggaaaagaatgtgtgagttcagagacttttctaattactaaattggtttgttaaaaaaagataatagcaaatttcttctttttgtaattggacatttcttccctgtaggctaattcaggcacagcccgtgcatacacaatcggttgtacttctgaaaagccataactagctaataacggctacagtgtcatcagagagtaatggtgtgctgattagcataattaatgacaaatggtggtgcggaattggtggattggtttagcggatgatgaatgcggcgaggccctggctggggcctgccaacgaggcctcgctggctgtcagcccttctgttctcgcccaggcagctctcattagtcacgatgggaggtgccagtctgtgttctgttgcagcacagaaaacttaataatccaagcaaacgtgattcttttttgcctgtgtatttactcacaaaattctccactcccctgttcccactgtggccagaacataagtcactgctgtttctaggtctttcctgtcgcctgaacgggaacaaaaggaggacgacagagccacagtcgtggccaggcagcacttgtgtttatctatatatgtagcgggaaacccagtaagctatacgttctgtcctgatagtagaagaccggcgcatttatcttcgatgtgattaatttgcattcacaaatgaggctgataaaaaaagggttcacctttaacctttagagggaaaagcatttctctgcaagatttcttgggagaccgctccttaaccgataagaagtaactcctttatcaataaagatgaaaatccttcatttgcattactgaatgagactaattattatatagttaattagcatctggaaatgaggattatcttaattacaaagcacaatttccctaatagctacaaaactgtaagtttgatctgtgtggaaattggtaactattattatgtaattagtgataacattaatagtacagaatatttagacataatttgcatatgcaaatgccatttacctgagccaaataagtggaccattaatgattagagcttgatgcatccatacggaaagttctagatccctgaatgggacccattgtgctaacttagaggtggagtcaataagcaccttttatatttaggcagtccactggattttgctgtaacaggaattaatggttgggtgatttcataatgaagccacctgttcagtgaactggactcttgactttgatttttcaatgtctcctcttgattcttagaagtgctttgcctacacatttagcaattctgagtctggtatctttcttacagctgatacaaacacttaaaaaaatagccaacacacatgcttctgtgtgtgtgtgtgtgtgtgtgtgtgtgtgtgtgtgtcagattgttgcagtgtttttcaaaggtgtgtgctatgggaatgtgatttgaaagtagctactgtagacttttaaatcttttatttcatccatgtagcacacaatgggtgccattattcagaagattaaaatgggtgtacctgtcagtctttgctgtggtgcgctgcagtaacaaacagtcccccagctcatgtggcttgccatactccactccatgtctcactcagtgacaccttggtggctgtaagttggctgggaccctgcttcatgtaccatcttattctgggacccaagctgagagagcagcccctagctgtggcagtttttacatccagtggttcctgcatcctctcgggaggcaggatgacaccccctcccccagcacaaccaggttctgtggggaagaggctccatcctgtcatgacaatgtgtgaggacagtccttctctaagggaagaggggacactgcacttggagtggtagagccacccactagtgttaggcattctgaattcaaaaagtgagtttcatgtgtaagaaaaatacaaaatcagtcactgaactggggaaaaccatgaatccagggtctgagacagtggttcccggtgtggaaagtgttgactgacaggatccacagagctttccactgcccgattttaccttcagtacatcaggagctgggttctgatgttagcttctctgtcactgtgacaaatgcctgagagaaacagttataaggctagaaggatttactgggacctgtagtgagtgagctcttctgctgtggactggggtgaggcagagagagtgttatggccgtggcagcttccacctcggtggccaggaaacaaaaaggaagatgggaagggaacaaggctggaattccaaggcacacctccagggagtgacccacttcttccaaatagcgccttcagcacctgagactgtgccagacttctgggtaggtaggcaggcaggcaggcagaggcagagcgtctgggctggtgttcctctgttcacagtctagatggtaatgttagccaaacttgagtccttaggttccagactgtagctgtagccctgtttctccagggtttgttttcctagcgacagatggagctcttggaccaggcagctctcctgatagctgtcctcaccctcactgctcggaggccccgttgagagcagaggcatcataggtgctggactcagatggcttcgtcagccctgatggagctgatgtgtttgctggacatgagcttggctttcactcctgtaagaagcgaatgcagtggggcctagggagaaggctcagctgttaagagtgcacactgctcttacagaggaccaggttcagttcccagcaccttacagctgcctataactttggcttcagcaggacccactgcctctggcctccttggatcactgtgctcatgtgcacatacccacacaccaacatgcagaaatacacatacttaaaaagtgacaaaattttatcttttttaaaaaaaaaaaaagaaaacaaagaactaaataaaaggcctttttccagacacatggctcattgatagatttttgttcttttttttctctttgttaaatcaaaaccagatgcaaaccatttcctttctgaattacgaaagtcccatgttcactactaaaaacaaaagttgaaaaaatacatgaaagtatgggaagaaaataaatgtcactcataatctctttgttcataaaacaatgttttagagactatcctttcttgactttttttttttttttgaggggagactggacatttatatgcaaaggtaattgtccattctggatattttttaatttgatttattggagtccagttttacatacaatgcaatccattacttttatgcgtacagctcagtggttcttgaagaatgacgagatatatgacagcccacttccagcagcaagatatagaatatatccatcacccccaaaatctcacttgcatctactcctagcctctcccctccctggtggacagtccctggagatctcatgtctgctttatgtcatgcccaccatgtgtgttgcctgacctgacctcatggcacctcctgtattgcatgtgtagacagtttgatcctttccgtggctaagtgtctgcttgtgatgacatcacacatctcattccttgtcaaagagtctggtccttgcctctaagagggatctctggacatcactggtttgggcttcaagctttgccagcccacctatatgcaaattatttctttgggattcgtgaggatttgagaaacctctgcatatgacactcaagcccggaaaactatagaaagttaagaaaaagtcaggtgtgtcatgaatccgtaaaatatatgcagacaatcgtctgtttgatcgttgactaccataaaatgtacacacctattataagaagttatgcattctcaaaactcacgcagccaggcatccacagatggtgcgtgacaccatttgcagtcaggagaaatgtaaacaagcataaagctgccatgtaaatcaaagctgcatgaagggaaccggcgtggcttctgaactgctctgatggtttttctaaacccgtcacctttgtgggcagctagaactcagacctgggtttgtatgcccgtggggagtcagcgcctgtactttggctgttcttttaggcaaatatgaaggtaaaatggttctgaccatttgtgtgtacaatgataagccacccagaatagcggctgagttagtttacattgctgacagatacacaaaaggggatctgtttggggtcccccctcaaggcctcacaactggttgttaatgtctaaaagccatgcctgtctgagagacagcattgtggcttcttgttagtgtgtgtttcctgggtaactagtgtggcccctccccccattccctgcctgactgaaattcctgaggtgggcaggggcttcttgaaaagtcattactgctttttcagtttgcatattgttctttggtttgggttttcttttctgtcttgcatctttgctgctatgtgtaggaaaacctttcctgcctcctggtaagtcctggcactgtcattactttttttcacactgaaatctaaaattcacctataattttcattgtatgatagggatgaaaatgcattgctcctcagcgtcgttatggcatggtatttctgttttagccagtgcatctgaaaggcagttttaaatgactgtcacagcttgcgtggtatgttctggggccccctccctgtcctgtttccttggatatatagcctaatggaaatcacacttttgtttattacaaatgtatacatttattttgaagatttttaaaaaacatatgtgtatgtgtctgtatgtatggatgtgtgtaaatgcatgcagtacccttagcagttagaagagggtgccagacacctcagggaagaagttagagctggtatcagctgccccatgtaggtcccctgcaagagcaggaaagtgtctttaaccactgagctctctccagcccaggagacatgtctttgatttcctgtcttgctgttttccaaaatggccttaacagttctagctcatttcttaaaatccagttaaaatgtagttacttgacgttctaaggaacatactctctgtctagatttgtttgaaaaccattgaatttaaacttctggaaggatggtcacctttaaagaaacatgactcttccttctatgtgtcatagatctctgtaggtcttcactttgtgtagattgctttgcctgttaggctttaactggtggtttcatacacacacacacacacacacacacacacacacacaattcacacatactgcatactacacaatacatagtacacacagcacacacacactacacacatgtgtacacctctgcacacacagtgatttcctttttaaattcaggcactaatttaaatttcatattttaaaaagtcagagtctattaaaaacaatattgaggttttttttctcatttgacttattgagatgaatcgttttgctttgatgattctgttgcatttagattctgttgttgtattccgaggtaaatcttgctttagggggtgtgatgttcttcaaatgtacattagctctgggcccctgttgtctgttgtgatgctagcatttatggaaatgattcaggattgatgcttatcaaaataccattctgaatgaatggtcagggatgtttctttcaaatatgagaatacttctaaaatattgtaacgtctgttctttgggggttgggaatggagaaagtctccccccaagcattagctggtcttagaaacacgtgagtcccggccggagggtttcgaggggagggacacaatttttatttctttcacaattattggggttttttatgctattttttcttaggtcagttttctcatgtatattttgtagagttatttgtggaggaagagatggagttaccagagtcttactgactagcccaggatatccccaaatactaagagtctataccacgcatctagatgttactttacaaaggtgctgctccaccttagtcaggtgtctcagagggggaatctaggtaatgtagccacttgctccctctcctgccagctgcccatgtgcttctcaacctcaacagggctctcctgggcccagtaagtctctagagtctctgctcatgggtaactgtgtgtcatggagctggcttctgtcctcctggttggccttccagtagagaagcaagagacttgtgcctgtttacggaactaagccaccttcatgcgtggactcccttatcccttctgtcatccccatcttgcaaatgaggaaatgagattcagagaggttggtgacttctccaaggtcacacagcaaatcaagatgatgtcctccacttattgtgcctccttgagaatgcctttctttccctgctagtgtgtcccatgaggcacatgcccagctcctgcaagctttgtgtgcccagcacctgagtggtcagagagctctgctacattcatgtaaccctctagacaacagcctggaacgatgacaggcacttctgtccctgcaggagctggttaactctgctgcctcccgtgggggtcagcctgcagcctgtccgtccatcatgtcagccaacatggctggcgtcactctccctgtgagagttgtttgcaggactgtgctttacatgagatggagcaggcgcggattatttctttcctattctggaaataaatgctaacaatagtagctgcatgtcctggtgtttggactgctagcctgtccccagtgtcacactcatccctgcttcatcacacagcaatgctgagacagggacatcattaatcccagtctgtgatgtgcaagctaaggctcagagtctggctcacttccacgtggtcacacagctttccatgccaacccagtggctactaactacactccgttgcctggtgtgtacataggcaggcacatggacatatgcaggcaggcacatgtatgtatgggcgcacacacacaattttcccgttaactaattggaaaggtgtagttgctgtgttgatttagatgatcggccactgtgctaaatctagaggctctgttatccatgggctactgctggatcctgggacataaaaaacaaacgttacaatgccctggggcccctgtccctgctttagcttgcgcagtgtttggctccaggcacagcagggctatggcaacccagattggcctaggagcacagagctctcttccagtcaaagttctgtggtcaaaacctgggccacagggcctggaaatcagctgtcctagtggaaagaacacggcaggggcccagcttctgctcccagctaagtgttccacagccaaaatagccatctttgatctcactgacaggtggcatggggtaatctgagggtctgggggtgtttgagactgaatgtggagtctcaggaaggaagttcaaggagaattgctaactgctgtgagaaataaaagacctgtgaaaggcttgactgcttccgtcattctggaactaagccctgcctgggaacaggtggcctgctcagagctgtagagtgcaggcccagagcagtggcctgcgtgccaccgcagacaagccactgtccaggaagcttctgtcaaccctatcaaatagaagagaaatggcccccaagccgtctgtctcctcatcctgaccagttaggtgcacactgaggtgctggaagagacagacgctcccctttgctgggtccaggatgctttgctgagcattgtctcccacctctgccgtatcgccctcagaaatggccctcttccatgagcacctgggctgccgtacactcgtcacagccctggccaatcctgctgaaagaattgatttggccagagaggcttcagggggtagcgtggagccagggcatggcacaggtagaaagggatcccaggagcctggaagtgctggtcaccagtgccctgcccctgttccaaagtttggagtttgggtgtggtgtggtgtgctgtggtgtgctgtggtgtgctgtggtgtggtgtggttctggggtgagggggcatgtttgtttttgagacagggtctttctatgtagccctatcaggcctggaacaaactaggtagaccaagctgccctagaactcacagagatcctcctgcctctacctcccagtcctagctaaagtttggagtttcatttttacttctgaaattagaaatttcacagatgattctgcctgcccacttgaactgtggagaagttgatgtgcccaagccctgccttctgccctgaggaggaggtgttgaccacatgctcgacctatgctcacctgctaggctcgtctcagaaccactgccctcacatgcacgtatgcataagtacacatgctacatgcctgtagccctactgtgtgcattgtcccagcccaggaaaggctctcaagccccaataggacagagcagagggaaaaaggaaacggggtacataaaacaatcaggagggcctggcaggggcaggctgagaggccccacacccaccatgcccctgcaggggcaggttgagagaccccacaccccaccgtgcccctgcaggggcaggttgagagaccccacaccccaccgtgcccctgcaagggtaggctgagagaccccacacccaccgtgcccctgcaagggcaggctgagagacccacacccaccgtgcccctgcaggacaggctgagagaccccacaccccaccgtgcccatgcgtttcacagagctttggcctaactttccagaccgagaaacagcctttctgcttccattttcagacttcaaagatcactctggaaataaagtttcgttgctttttttttttttttcccagtgagattccaaaggttttacacacatatgagggcagagtttgcctggaggctgcctcccatgaagccaatgccagcccatgctcaggctgtgccaggcgcccactagcgtggcggtcctcagcacctcttgctaattttcgggtgctaattttcattcagctaggaattaatgcagcaagagggcctttttttcttttttttcctggaaggaaccgttcctgtcttggcactgttcacagctattcggccatcccggtgaatctatctaaagagtgggtgccacagtggcccagagaacagaagggtttctagtcttgaccacaggagacatccactaagagtaagggcaagggctggagagatggctcgggagttaccaatgcttgctgatcttgggagttctggggttcagttcctaacacccggtcagatgactcagaacccaccagtcactccagtgcaagagtaagggaaaccttggggtggggtatgggccttgtttcaaccccacacagcatcctgaatcccaaatactgcttgtagttgactacaaagtgtaaaaggtcatctcaaacagcaagtattttgtaggatatgtctctaaaatgtccccagattgccatattaaaaaaaaaaaaaaaaaaaaacctctgtagtccacatgtccctcacaaaactcagcaatgcaggaacaagtgagacattggtgaacttgagaatgaatgattcagtaagtaaaagatgacgtcatttatcaagttatttaaataaattttcgctgaaatgaattcctcgagaggtgacatcattgttaataattttaacggtaagatttctttacataaaaacgaattgactttttttaacaagctgacagtatacttggctggggcttttactaacttagcccccccaccctccacttcctgtctagagtgttcaaagtgtaggctgggtggacaagcctgctgggagccaggtgggaaagaaatcgtcatactgtggccatcgtgagcttggaagcaaaggcacaaggcccatgtagccacagccagtcacctccaaggacaggaagtgctcctccaatggcagactctgccatggcctgcaccacctctgagaatgtcctctgtgccatccgtcctctgtcctctgacatcttcataccacaagctcctgtccctcacagaagtctccctgactcaccccttacaagggagcccagtgtgctccagacagcagtccagtctcccctcacctcagaccccatttatcacacgtccacccaaggccctccttgttcttaggccctggagatcccctcacctcatcagtagcattagctattggccctttgatattcattctctctctctctctctctctctctctctctctctctctctctgtgtgtgtgtgtgtgtgtgtgtgtgtgtgtgtgtgtgtgtgtgtatgagtgtgtgtatacatataggtacgtgtgcacacagtcctgtgtggatgcaggtgtatacatgctatggtatatgtggaggtcagagggcaaccacaagtattagtcctcgccttccttatcttgaatcagggtctctttgttgctttcccactgagtaccccaggatagctggccgttgagcctctgaagtgtctcctgtctccaactccctataggcttctacatgggctctgaggcagaatgtcaggaaggctcactcactagccaatgagcaccctctgtgcagaatcccagtgcacctttgtagactgacaaattcattcatctttccaccctctggattgccaccagtaggatgttctaccatggctgttagcatctcagatccaaacaagagctgtgcgtttaatgtaaggacacagcatcctgtccttctgtctgtcctacattgtgttctgctcatacgactgagacctcaagcaaccatggaagcacctgtcccacgcctctcttcccagaagagctgtgtgtggatggagtggcctgtctcctgtcacctgtgctttcctcagcgctgaacacaaaccacagcttggtgcttgtccagcagccttcatggaatcaaactgagagctgccatcacaggctagcccattctccaccaggactcacacagtcaggacaagcagaacctgtgcttcccacgggtgtctgtcaagaaacagtttggggacagttcataagaaagatggaacagaaggtgaatggctgttgtcccatatccctgagccccaagcctggctccctctccaagccagagccttgatactgcactccggagtccctgccaagcctaagctgagagaatttttccactggcccagtaaatggttatgtagccatcaggagatccacattctgcacctggttctcttaatatctactgggtgcatgaagcaacttcataaacccctccatggtagatgtcattatggcaaagctgggacagggagggttggtttcaccagagcccaggggagaggctaggaccggcagaatcctgccggctctgaatccctgagagaatccagaggtgccaggtgtgcaatgtctgggacatcctgattctgtccagtcctggctctgggggtgtcgcctcctctttgattgacaccatcttctgccttttaagaaagtgtgttgcagcacagccccacttcccactggggcttccatgttttcccttagagtcttgcttgacccactaagcagtcggtcacccttggcttctgagggctctctcgatgaggggtcacctgcgtggaaccttctaagccaggagactgtacagaaatacattcttttgctttgttctgaccaaaaagcctctttaaaaaacatcagggaaggtttccccatggctgcaaatgatttcccacagaagcacagagaggaaacagggctccagtccccagtggaagtgtcacattccttagccccagactacgaagagctcactttgaattatacagagaaggaggggggaaccaaaaataaaaccccgtctggattccagaagagtcattcacaaggtgtctgcatttattaatctctttccccctactggggaaagtaataaaccatagaaacccctggcattaaaaccacagtgcgcaagtgcagacctagggttaaaaccacagtgcgcaagtgcagacctgggtcctttctggggtcttttcatgctgcaaacttcagaggcccagaccaaccccgagaggtctgcagccctgaggatgcctgtgcaacagaagatgggtcatctgttagtactggctgtctctctagacatcttgccttgtatttgtcaagggtgttcagagcctgactgatcctatctcctcactaagcgctgtgtctggttacaaaggccacagattacccagctgtcagtggtgacccatcctcaccaggtaacagggcctgtgtgtgcagaggcacttcaaggacccgccgccactgcgaggcctggtgcaggcacacctggaggcttccgtgaagtctgaggttcagggctgagggttgcatgtttaatgagcatccaaggggctatgacttctgacacacttcagaaggaaccatgtttctaatatccagggccagctgtgaagactccatctttaaagcagtaaggaccaaacactgtcatctgggctgcattctctgacaaagtggtgccacttgctttgagggctgaagtccctagctccctaccaccatggaagagtgagactgctctctggagaaacctgcttcagacccagcttactgcagacactgctgcgtggactagtgttaccaagaggctgcccctcctgcggttgcaatactcgccttggactttgaattgaggtctccttgttaaccagcctgtggtctcatgtaacttaggaatgcctgcctggctctcaatggtccctaaggaggctccctaggtaactgtgttatatctccacagcctgtaaatctgattcaagtccacccagcagtcctgcaagccaggactctgctccactcatgaggtgtacccacgacacgaggcagctttcccttagcagacatctctaggaatgtcacaggtacctggtccctgagtccatctgcaggattaatgtgttccacaagacaagccattccccccaggctctgcctccacctcacgcacctgccttggactgtgccctcaggttctgacagcccagtttctaccagcatccatgtgttttggtgtgtgccctatatgcaaacacttgctcctggctagtctacatttgccatctagtgtccaagcctccacatgtaacttccgtgccctttacttgtgcagtcagtaggaggggtgtgagcatcatccaggtcatatgcctttgtgcatacatcacaggactttcttgatgattgacagcaagtacacaggaagcctatgcagctgcctaggaggtcagcagccacctctgctgctatcttcttggtgagtctaagctctggcgactcgtgtgacagacagagaggaagaaggccctgcactggacatccaagcaggtggtgaagctattccccgttaagccaaagctggaacaggaagcctggaagacaaaacaggcatttcctttcatcttgcaggctcgaaatagcacctggctccggttcccttgccgtggtccctcgagagcagccctgcagctgtcagagcagcctggcaattccacaggctactgctcactccgaggtgatcaccagccgcatcctctggctttgggctgcattgtgggaagtcactgtaaagactcccaagtttgcagttaaaacaaggaagagggttttcaggctatgagagacaaaaggagctaaccagggcacctcttttaagtagacactgtgctgtgagctgtgtagacatgggattttatcatcaacccagcctgggcatctgaagccttgaaagccactaagaacatcttttttcctaacccagcatttttaagctcctaatattatttcacatttaaaggtgacagcaatatctttaacgttcttctattggattaataacgtttaatgttcaaagcaataaagcggaatattttcgtgagactgcttttatatcagtcatggaaaacccaagtttaagaaaaaagagaccacacacacacacgaatgctaagaaccctacactcaaaaaaaaaaaaaaaaaaaaaaaaggcatgtgtagcttgagtggccagctgggtgggttcgtggattctggctgtggcatgaggaagggaagggcagcccactcgtggcagtgagtgagctgagccctcacccactctcctgccatccgtctccaccaagcagcagaatatgacaatgttaacatttttcattcccctgacgttacccattaataaagcaatgatccaaaaggggctttgctgagtcggttctttatgtgcccatcactcacgacgagataatttcacacaggatcgttttaaaattaaatgacgataaaaacgctctgctgttctgtgttcaccagttcatggaagtctatcaagtcattaatgtgtcatgacaaactgctcgatgggtacaagagtaattaattatttgaataaataacaagttgaacttggggctttgaaccacagtgacaccaagcagcccattaaggatgccttggaagcctccgcggggcacccgtgtgaagagttaaaatgtgggccagggagtgatggaaacggatttcataaacacagggtaagattttgtggggagaaaggcacagtgacatactcccgtgcccacctgcggttcagtgtcaaaagttccttggcagcggccgttccaggataccacttgatcagccgatgacttcagagaacaattagacagattttcataatcaccattaatctctgcatattttgcaagataattacagcaattattatttagattcctcttttatgtgcccattgtaaaggggagcaagtgcttattatcctggagagttcaaagaaccttgcgtgcgaatcccttgtcatctctgtgcccattatttcaactgtgttgcctggaaaagttcatcggctctagaagcgagagcaattccacagacgctgttattaaacctcgagggtgagcttcgactgctggatgaagtgtttgctgggggtggaaggtgtcaggggagatggccacaatcccttgacattgctgtcaggtgacagggagcatgttgtgatgggtacagtcagaaacgagaggtggcctcatacctacagatatgttttctggaagatctacaaagtgaagcagctgcaatatttagagtgtgtgtgtgtgtgtgtgtactgcctttatgccctttaaaggttaatattaaacctgggtagctcttggcttgtacttcacagacagggcaacttgataaacagcagcacacaccatgatctttgctgatcacagtgggtgtccccttggtcactggttgggtctcaggctgctctttcatcccctgtcactacccagagagcttacctgccaaagcaccatgtgggaagggtgactgcagcttactgtactgttttcatcaggacacacacctctgtatggatggggtgcccctgctctggcacatcgccctggccttggttagtgttcaggttttccattcttccatggccatggtagtggtcagcagtatccagggcggccatgagtaggacttgattccctttattagaggagaggaagatcttggtgtcaggatgacacctccggggtctgtgttgttgttgttgttgttgttgttgtgacctgttggaacactatacctttctagtgtgtgctgatcacaggctcagcgtggaatcaaagtaaagggcgttggcttgggctggggaggtgggtaaagtgcttatcttccacccacgaggacctgaactcaaaccccaaacccatataaatggttaaagccagcttgcaattctatgctggagaggtggaggcaggaagcttcatggggtgtacccagccagtgagagaccctgcttcaaaaagacagagatcgccaggtgtggtggcacacgcctttaatcccagtacttgggagtcagaggcaagcagatttctgagttcgaggccagcctgatctacagagtgagttccaggatagccaggactacacagagaaaccctgtctcaaaaaaaaaaaaaaaagacagagatcacatgtctactgacacctaagactgacctctggcctctacacacatgggtgtacatgcacacagatgtgcatataaagggataggattgtccctttgtcacagaatcttaaaacaaacaacctattatgaagcagaattgatttctgtactttccttcatgcccttgtgatgacagccccatagatcaaagcactggtaatcaggatgtcaggcactgcttacagtggaggctaccgagcaagtggtgaacggtgaggcaggatagcccaggacaacattgttctgttggtttcaggggtatacagacagagaggcaagaagggcacccaactcagcagtcagatatgctgagcaggttggggtgtctgggtgctggagggcagggagcctagaatacataaaacagttgggacccatgcgccaggacctgtgagcttgggaaagagtggaagtctccagggaaaggagtgggacagtgagacctgcactttaaaggagactctggtggccatgaaggccgttcccctggagacagccatggcatgctaccgtgatcctcctagcatctccatccctggagcagaagtccactcttctctaacatgtccagctctctgctctcagtgagacttggagacatgttcctatctcatccttcaccagtggactaaggcctctgagcagctccgaggccctaacaggcatctcatcacacacaccctccccccttcccataggcagactacatccccaaataacacttccctatccccagctgtaagcagggcgcttccctagatgcccagggctgtgtggatgtagataagtatgtcttccactgccctgacagaggatctgaaactcccttcccgcctgcctcttcggtccagaaaacaagagcaggccacaagcccagggctaccattcctgttgtttgctctccagttttgagacgcctctgtgtgtggaagctgaggagctgacaccaacacatgtttgctctttgtggtgttgctcacgtgagatggggcatttcaggtggctcttaggccttgcctagtcatgcctctcgagccaggctgcactgtaattacccaggggctctgaaaaacactgaaactcagagatacccttcatctggtcccaggcagggagagccaggaaggcttcaggcagcacccatgttaaaagtctgtacataaacacttggacagccagtgatccagacagcactgccactcacacgggacacagacaactggccccactcacgagcgccacccacagtggacaagcctctgttcactgttgcctacttagctgtcatgtgccaggcactgttgtaggagcttgggacacagctgtcatggagccatactggtggagctgggatgagaggtgcattgagactcccgccccaccccacactgcccctgcccctagcagccaggccagaaagcttctgggctttgtccttgtacagagatgagagtcagagccggcattttggatgttcatcttacacatcctcctgaatccttgcatctcgggggaatgaccagccccacgtgcaaaggctccgtgagcaatgtaaagatccgaaagtggaaaaatctatgtaaaatttcccctcaaagatgcagcttcctattagatgatttgccttatcattatctcctaagacatagggcttgagctagcctacgattaccactcctcaggggtctgtgggtcaacagtggttcttttggtatgttcttcatggctggactagatggtcatgcatggggccatccacacacatgtcagaggtgacaacttggttggtgtgggaagcacagagccaggactgtaggccttcacttcacatggtggccctgtggttctcagccagcccagctgggacacagcagggaaccacacacccaggtacacaaactggtgtcacatagattaatgtccaattaccccaagcaagtcacatcaccaaggaggaaagggatagcttaaacttcatggtggcatccatgacaaaagtgctttgcagagggatgtgtgtgcagggttaagagccacatgtggcatattcggcccaccaacccctaccctttttcagagaagcctctgtcctggccacagggcttcctttggctgatacagggcagtcactagggaagagggaaagatcccagtgttgaatttatttacatctactgtagagcactttctgtggtgccccagagatatatactttataattaagaagtctagtgtttgagataattcctattaaaaatcggatgtcagccctagggtagacataataaccttacatgcacattacagacttggcaggaaattaggtttgattgaagccccatcaccttgctcagcctgaggcaagttggagagtgaaagtcctgtcttcttcagtccctgtgctgagccactgttcctcagcctggactcgggcttggcttcctttggcttaggtgtatgttgtgtgtgccagcaggaagaactctgaagtggttctgtcttcttcctcagagtgggcagcagggatccgtgagctgtcacaacttgggtaaatttgtgaagtcactgttttcccttcaacatggctgtgcagtgggagctgagctatgcctggacagtgagagtggcctgtccctccagggtccctgacctctgctcatgagggttggcatctgctgacctttgtcactatcattccttcagtattataggttggtgttttataggccttcctctcatcctatgtatgtatttatcagtttgcatcagtatgaaccaataggttctcatttcttaacctcttccccctcccccaccccagacagtctagctatgtagctcaggcatgttttgaactcccaatcctcctgcctcagcctttagaatgttggtatcataggtgtgtatcactgcacctggctccatcatcattttcttagatgctcagattgtcctaggtttagccagtaggagccccatcaagccagactccaggcccttctgtcatggttctgtggttctctgagggtgtctttggtttctggtacaagatgcttctgtctttcccatccagtctagagtcagccatgttcacaggagcctgcttcttaaagagcagggtgcaagaaagcaaagcaaagactgactccaagtgtgtgcgctacttgcaaatgcccttgcctctaggccagtgagtctcaaccttcctaactgccgcccagtaatacagtgtctcttgtaaccccaactggaagattattttcattgctatttcataactgtacaatttgatatgtattttccaatggtcttaggtgacccctgtggaagtattgttcaaccctcttgaagggtctctacctatgtgttgagaacccctgttctaggtccttggctgagaaacacgtgtttctgcatgtacagatgtatccacacagattacatctgtgtgcgaatacacagctcctcctacacagtgaaacctggcaaactcccattctggtccatatgacatagtgtatatgctgaactcgtgtgcttcctgacaactcctgggatctttctcagtagaagaactgagtcctacagtagcctccctcagctctgtcctcaggacttccacaggtttcctccagggaaagagtcatgtcacttgcctcttgtcacagtgctagcaactgccaaattctatttctacacagacataacagatatattctctctctctctctctctctctctctctctctctctctcttctcccctccctctctttacacacacatacacacacacacacacacacacacacacacacacacatactnnnnnnnnnnnnnnnnnnnntaagaaatgagaacctattggttcatactgatgcaaactgataaatacatacataggatgagaggaaggcctataaaacaccaacctataatactgaaggaatgatagtgacaaaggtcagcagatgccaaccctcatgagcagaggtcagggaccctggagggacaggccactctcactgtccaggcatagctcagctcccactgcacagccatgttgaagggaaaacagtgacttcacaaatttacccaagttgtgacagctccctccctccctcttcttacacacacatacacacacacacacacacacacacacacacacacacatactcactcagtgcaccaggccaagtactacttgtttctcttgtccttaccaataagtcctaaccttcttgtccatggtgatccaactcacatgagccagttttcttctgttgggcatcacaagtgccccacaaaaacacatgtcaggtggaagccccagctcagcccagctgcctcctggcttcccctcctcttaacaattcctggtgtcccattctgtcaccctggatccctcctgttcctccagcccagttaccagcctcagttcttccatttgtgctgcttctgttctattccctttgccccagccacctgcaccagcctcactccctatattaactagggtttcattaatataataaaacaccaggatcaaaagcaccctaagaaggaaagagcttgtttcatcttatacctccacatcacgcctatcatcaaaggaagtcagggttggaatctggaggcaggcactgaagcagaatccatgaatggatgttgcttagtcgcttgctctacatcaattgctcaacttgcttctttgtaccaacctggatctcaggcgtagggtgcaccgcccctcagtggtctgggcccttccacacctaccattagtcaagaaaaggcccccagacttgtatgggcagcttgattgacagcctgtactttctcaattgagtttcctctttatatacctctaacttgtgtcaagttgacaaaaaaggaaaaaaacaaaaaaacaaaaaaaaacaaaaaaaccaacctagccaggacaattgacctcttgtcaagttgacacaccaacacattgatattaacccataacctttccttttatgtttatccccaatgtctctataccaatatcacaaaataaggcacattccaatttttaaaaatcccgcagttattaaaaatccaaacactttaaaaagtcagtctctgctaggtatggtggtgcacacctttaatctcagcacttcagaggcaggtggatctctgagtttgatgcctttgaagccagcatagtctacaaagcaagttctaggacagacagggcaacacagagaaaccctgtctaggaaaaacaaacaaacaaacaaaaaacaagcaaaaaaaaaagtctttatggaacctattactatgcacaatggacatatgccaataaattttttaattaaaaataaataaaacaaaataaaaattcagactctttaaaataaccaaagtcactttcaaaattgtaagtctttccaaaatatctgaagtctcctaactgtcggctcctgtacattataaaaaaaaaaaagtgtgtgtggaggaggtgacattatatgtcaaataggaaaagccagggccccgttataatcacatcaaagcaaacccaaaggccaacagctaacagtaaaagcttggtgcggtgatgcgtggaattcatttaagagcctctggattccaagggactcataagctccacccctcaggcgctgccattcataacactcatggctcctcccacaggctcaggctggctccactgcacagctgctgttgtccttgctgggctttcatggtaccggcatcccacctcccccccccccaacccccccgatgctataccttccgtactgtgctataccttcacccatagcctttcctgggctctggtcagagactctcacctgccacacggtgccaggcctcagcttctcttcctgactgcttcagacctgaggcctctgttgcagctgagacctagcctccaccaacaggctctcctgggctctcgtgatgccaagtctccactgttctcaatggcctcttcatgccttggaagccgctatcaccggaaatgatgcagatgtgaccaagctctgctgccagcatgagatgcaaccttggcccctccggccccagaaggtcctgcctcagtgatgctgttctcttcttagtcacagcttattcttcagctccacgtgaccaatataattgtaccagcaaagcaaagactccactgtagtggttctggtctcctgttaatcacagccagttcttcagcccccactgaccagggctgcagggtcttcttactcatggatagcgtcctgacttccctctgcacgtgcacaagcccggctccagccctgctccactgtctgtattgtgtttccaagaccccacaagagctcattaagcttttcacttaatggcttttccagcccagagttccaatgcctcttcagtccttccaaagacatggtcagatctgtagcagcataccccacaaccctggtaccaatggctatcttagggttggtactggtgtaataaaacatcatggcctaagcaacatgagaggaaagggtttgtttcgtcttacgcttgcatatcacagtccatgattaaagtccatgattcacagtccatgattgaaggaagtcaggctggaacctggaggtgggagctgaagcagaggctgtgaggagtgctgcttactggcttgcttcccttagcttgctcagcctgcttccttacagcacctagggccatctatccaggtatggcctcacccacagtgacctggggcctttctcatcagtgattaattaagaaagtgctctacaagaaaggggaaaacatgatcagtatatactgtataaaattattttttcagtaaaaaaggaaatattcatagacttgcctacagaccatctgatggaggcattgttccattgtaggtccttcttcaccttgacattctaatgtgtgtcaagttgaccaaagactagccaggctagtcccccaggtggttctcctgtctggttatcctggctagactggatagttgggaatgagccatcttcaaggctgagactatccccagtctctccagcccacaagcctttgtatgactcttctaacagccatttgggaggaagacgaggcaccttggaagctggctgtaggtctctgccccatattcctatgaagctgtttttaaaaagtccgagttagagctttgccttctaatggcaagttccacagctaagggaaaagatgcagaacacttacgctatggttctgggttaactagcatacacgtgtgtgcatgagcaagcttgcacatgcgcgtgcacacacacacacacacacatatatttctttacacatgaagacacatataaatgcacagaaaacagcgaagggcccaaggcctttgcagacccctgccttggggttggggctaggaacttcaggatattttagcttagctggtctttaggaatggataccttagaaaacagattcatatattgagacattcaaaaaagtacaatttaaaattgtttgtgctggtgttaaaatgaaaaggggccctggaagggaaggtgcatctctcctcctcgggtgtctgtctacgggaagcgggtgtgtggcgcagggcctgtccagtggccacccagcttgactccagtaacagtgacatggctagaggagacccacacacacagagaactggggaacaggcctccctgggcccagattctgctcttctttctgcacaatctggctccctgcttcatctccagctcaccaacagacttcagaattccatcttggagcagcaggtgtgagcacagcccccaggagccccctcctgaccacggaggccccctgttactcccatggacgtgatcctgagacaactgtcttcaccttaagccaagtgcaagtggttttggagtgaagccatgacagagttaataaagttaaaaggctttccctgtggaggagcgtagccgttctagccaggtttctagtcccttctgggtgtaggacatgccctcctgcccttcctgggctcagagctctctaagaacctccctcacctaaccaggtgtctgtctgcattagaggagtggctgctcaaagcaggggcctgaggcctcttggtacttgagatgtggaacatggggtactcggacgtagaaaggaattgcccctcaattaaagtgacagtgtcaaacattttgcgtggagatgggatctagagatgattgtgtacatgtgaggtccagatggcctgtgcttaacagaaccagaggctcctgtagtttaacctccgacttctttacagtagttttggttttgtttctgcttctgtctacggtgctagggtggaagtcagagccttgcacatgcttgagcaagccctgcatcgctgagcagtccttccagccctttagggctcttttccaaggcacatcaaacagctgaattcatttgaggtagggaatatctctagttcttgtcttcttgaaggaaagaagtcagtcaaaacacagatattttaagcagaagttcatttagcagagcaaagccaacagtcagacacagtgtgaactgcccccaacatggaatatagcctagtgcattctatgatatggatttaaggttttagaaatatttatgaggtggcatattcatgaggtgatagtgacccttttccttcacaactcatgatggaccagatttttctttcatggcatttcttcccatgatcctctaggaaagcccatgggaccagacttgaggtcaaaaccacaatgcacatggtattttaatggtgccaggtctctcgagcatacagacccttcattagtgcctgtggaggacatagcacaatcctagctacagctttgaagatattccaccacaacagcgttctgttggctgggagactcagccttggttttcttcagtcacctcacatctaactctttacctacatggcactagactgcaccaggacctccattccagatcaggcttcatctgacactcagagaggacagatgccaagaaggacagtgttgggtaccctgtgagtcacacaagaaaaggcactgtacccgtgcctttgggttaggacccgtggggcagatggtttaacgtgggtgcctagagcctgtggggggcctttcctctgcagcagtaagattacctaccacccctagccaactgagaagttgtttttagctcattgcaacttgagtagcccaaacattatctttttcttttacagttgaaagaaaggctcagacaggtcagcctctgtcctgatcatagcagttgtgaggcaggagtttgtgacctgaactcattccccgaaaaaccaggcactgctttatatctgcatgagtggatgcagtaagtctgccatgctcagctcattcatgtgtactgtctcacatgcctgcccagcattgcagatggggggcttatgtatcctggggcagatgaaactctgactcagggctgggtgacttaccaaggccacatggctaacaagctggcaccgcggcatgtgcagctgactcctgcgcccacactccttcctccgtcctcttgtgcgtggggctccggagtctccggctgtggctgataaattgctccttttggcttatgaataacatggcaaaacaaattgctttggggacctagaaggaagtcgttggccttgtgtaaacgcaattggagtgtcacggagcagacagctccggaggcgtctacaaacatcttccaaagatatccccaaagtgagtcacccagaaagcaggatgccccgtgttttggtttgcaaatgagttttgagaaatgcccttgagaaattgggtggttggcacctttcccatcccaaattgcaaaggactttggaaacaccacaggagaggagagaaaggggtggggtactggctacttactgtacttactgatccaagccccaagcaggtacacaagattaaaggcttcccaccactgcactgcatttaaatttcactctggcaatgactacctgccagtaggccagttcaccatcccttctgagggtacctgggctcacctgacacagtgaccgttagcagctaataagtgctgggaacaggatcttgttttaaagcttacattttcacaactctattttatgaccctctgtcaagcatgctaagatgcaatccttccttgtctcttctgcttgtggagatgtcaaggaggcaaaccccgaggcatgatggggcatcaaaggaggcttcaggttgctttggaaagtgaaagggtagtttccacacggagggaaggagcaggacctggggtggggtgatggggggtgatgtccaagcagatagagcctgtgaattgaaaagctcccccaagagcagcgaagacaggatctgggtcagctgaagaaagggagaagataaagccctagaccagcttcacagcctctttccagcgcgggtggggcatgcggcggatcacagctttatttgtttaaaccttgagatctgtaagcattcacagtcctcttgacttgtgctgcctggttgtaagaagcacagttgaacgagctcattgtttgggggcttctttctttaatgtattttacaaacactcgcggtgacaggcctgacatgcagatttctatgtactcgctcttcagtctgggattacagcattaataacacagttccgtgcttcatgccatttttaagcatgatcgttatgataaagggcatatacttaattacaggcctgcttaattacagctctgttgaagctcgtttgtttaggagaatgctaattgtgctacagagcccgcggcacatcctcactttcagctgctccttgttgctccagtccatggatcagcgttggttaaaactgccaccatcttttgctttaagtaaaaagacgaaagcagcagccatacactgaagggacacagtttctagtcagatattggaagccaccataccagggagatctccccatgtgccagacccctgcttgttgtcaaatgtcatgtctgttgatgtacaggagacttcatgaactactgtagtatgcccattttatagacaggctcagaggtgtggtagccctggcatggacagcctccatctactgaattgtgaagggaccaagaagggagctcgcttctgagctcccagcccatccttttaccacaggccaggctatgagcctgaacccagctccttcgtgccccagaacttggtgcctgacttgagtgaatagaggctgcagttgggaaggttgagccgaatggagcaagtctgctcctttgtactaggaaggaacatgggcttccttccttccttctcttttgtggaagagaccttggtaggaccgtgggccttccacctttcttctcttctttgcctttgtaaagtcaccctgggagccctacctgaggaaaggccaatgcctgttcgtgtcattcctgattctgcagcatgactgtgcacgggtcaggcaggatccaggagagaagccatgccctaactcttgctgattggagggtgcggtgaccctgcaagccgtgtccaccagcagtgtgtggccctgaaggagggtcagtgagagcctggcagctagggcagccatcacacatcacatcagcttagaacagtggtaagagaaacatacagcccagactggggaaggggagaggcagtgggggacagggctccccagaagagggaggacagagatgatttatgagcagtcttggggatcacatgaaaaatgggtgccatccttttaaggattatgcttgccaaacctctgaatagtttcatatatggaaggccatccagctaaggctcctaggagtggatgctgttgaatcagaaggcaccttatctcctacagctaaacgctgcaatgcagagtccctacccagtctcccagcaagcaaacagctctgcttgttggctctgccctgtgcatctgcctaagaggacagtggggtcccctgaactatgatcggtctgggcagcccttcaccctatagctgcagcttcctagcagatatgagccttcacccacctcaggccttctcttatctaggcaggagcccactctgcctgtttcccatgtctcaaatgcagggctggcttgctaggcagggtcccacctcctggagcagccgacctgactccgcctctccatttccttttggggttagtttagggtcccatgatgtcctccctctcttcaaggctctcaggatgatcataaaagaataccatgctagcacgaggtgtcactctcaagctcggagcagaccaagtggacccagattctgtggccatgctgtggcactgtggccttgagaggggctcctgtcatgctcagtagtcaaatcaccgtgatgcgtccagtaagcagtgatgcagtaagccagttccctgttgctactctgcacgttttccattcgtcctgctcagctggacctaaacctcaaggtgttgacagaccctggtaaatcccatgctctggtgtagcccaaacgccagcattctgagcccttcactgttagccaactagcaagcattcactaagttcccactgacacttcacttaaacgcccatgtgtttcttttccaacattgggtggtgtcctgatccactccacagcagttgcttaatccgcttctctagtgcctaggctatgtcacatggaagggggctatgccacttgtggaagcctgctgacaactttgtgtgtcatttccctcctcctgccttcatgccattgtggggctcaaactcacgttgtagaatttgtgcagcaagcacctttacccactgagccccatctcagtaacccctactagactttttaaaaagatttatctattttgtgtgtatgagcgttttgcctacatgcctgtctttgaaccacatacatacagtattcatggaagccagaagagggtgtccatcctctggaactggagttaaaggtggttgtgagctatctgggaatggaacacattgtcctctgcaggagaagccagtgctcttaaccactgagccatctctccattccccctgcccctcaacacacacacacactcacactcactagatttttataatggaatttggtcagtttgtatggcctggggggtcacatctgcttcagggtgccctgtgctgttaggagctctgtgctgttcttgagcctctcccctgtagcagatgggctaagatgtagtgtcctgtagtgcatgcgagctgtgtgtgactgcccagcctcctattgtaagtccccacctcagtcactttaccaaatgcctccttgcagtcaggtccgggcacaaggggcttacatctctgccaccagcatcctggtggccaccatcgtgcggccttacgtttcttacaacatgaaacactctcccctccgacagccagtaggctgcagagctcccttaaggctgcgggtgaggacttcactatagaagttggtacagagaagctccgtttgctctgcacaggggcaggagcagtaatctgcatgctcccttacccatgtgtaggtgaaattctgttgtccttgtccaagtctcataagtcaaggcttctaagttactccttcctccctgattgacctcgggaggctccaaactctggagctctgcttggccatctcaaaaaacgatcagaagtggcacggggccctgcaagcatctgaggccatagcacgcaaatgctgtgtggagtgaacagaagcttagagcttacattggatggttggtggcaggctggtatggcctctctctgcatgttgatgggacttgcctgcctccctctctgacaagcttgtggctttccaaggattcttcattggtgggactatgtgtgttgtggcagattctcaggtggtgctaggatgtcacaacgtgggccctccttcctgtgttaatatcacaaacctgtgacattagccttctcttctgggttctagggcccagctgcagtgggagatggcccctgccacaggtgtttgttgagcatggaaagctcacacaggaagtagcccatagagagagggcccagagtgcaggccggccctcttccctgtggtcattatggacacagcctaacatacatgtatagcccatcacagcagacactggaccgggtttcatcccttcctcccgcgttcttttttctacttctacttttcctcttccccagccctgaaagctggccccagtgtttgaataccagggaagccttcattttaggaaacatttgggggtggggtgcacaatgtccactccaaaatcacagtctacaacaaaccaccctcttactgcaggctgcaggtccctgcactaagggccagatctggacactgagttttgcctcagctcagtcagcagccgggttctctgttcacgggtgacactgtgagggcctgcaccacatgttcctcctctgtggcaatactgccaccagtttggcggtggagatctagacacagatggattgcaaggcacatggtacatacaggaaggaagtggcttcccaggccccgcacttctctcacacaggctgcttggtccacatccttcctcatgtcctatggaaactaagcacaggggcaagtcttaattcagccctgnnnnnnnnnnnnnnnnnnnnnnnnnnnnnnnnnnnnnnnnntcccacatacacactgagctcactcttccaggcctgggcacattccctgcagactcagagcacacacctccctgccattagccaaacgtcttttatacatgacttcagatgctcactgcaagtccaggccaggactcaggcctagccatctgaccaccgaactacttgtctttccatggaggccaatgagcacccaacaccacccaggggatctgtggcttggccaagaaaatgaacaaaaacatgcctctgccagcttcctcccactcacgcaccacttcttcctgctgtcatcatttatgatataggtcagactcccggcccagggtaggaaagggcttccacaccagccctgggcataccctgactgactgcctatactcagaggagtcgtgcagacatctgcatctctgggtcggatgtagtcactgagaacaggggacaccctgtcctgtcccactctagctcccagccacgtgccctgggtagcagctgcctccagccagatgctcactggtcctctgtacttgcatctaagagtcttggacagcaaccatgtcttgagtgccttcctctcctctcttctcttgcagcaatggatggtgtgccttttatgatttcagagaagttttcctgcattccagaaagtgtaagttttatgtatgaccccctcctcctctcccaccccaacctgaaatcctgtagcttccgtgtacatgagctacgcttagctatgtctagctggcccgccggctggctgagactgggtctcacaatgcagccctgctggcctagctttgtgcaccaagccagccttgtccttgcagagatgcatctgcctctgcctcctgagagctaagattaaaacatgcactgcccaggcttaatgggttttcttgagacatagagctctggctggtctggcactcactatacagatcaggctgtcactggactcagagatctcctccctagtgctgtgccaccacatgtggccttgatttttcttcatggtgatggagttggccgtagttcccactgtcattgctgtattctgtgtgcacactgcatgctccactatggcacggagggccaatgcctctgcctatactttgcccacattgagccctaagccctcctgaatggtagagggttgggtaagccagccaagagcagaggccagtagccagaccatgagcagtgccagccacagccagggccctgtcctgagcaacatcccctcctggagtcacacctccgatagtgcctggtcctcaggacacccttcacccctctctcagctatgcaagcctgaggtgtgctgggtcactaaacttgtttctggcttttatccttcctgcagaagattgctttgaggcatcactaaacaccacggccctagtttggcccagctaaagaccccttcagtgtttttcttggacccagtttaaaaccacccggctggcgatccaacctgctctgttgtttccatttttatgaaatataataggcctcctctgaacccttctggtaagcgcttaatcttgaaaaatgctcctgacgtgacacaggaagcctgaggaacttcagcggagccacttggctgtgttgccatggagacgctggcactctcccccatgctccctgggagaggctgctctgccctgctcaccagctccagttgagaaagtttagtggaatagttagagcctaatgatgcaacagctggacctctgctggctcctgggccaggcgggcaggcagccccgtcctcacaccacgcaggctggcgtctccagcacagccaaactgttttgtggctactggtagcacagccccaggagctcagggtctaatttggtggccctgtcccaagttcgccctcacaaatatgttgctgccaattcagcggagcactcaaggccccggatgcaggccaagctcagcgttaagctcttccaagcacttctctgcttaatccccctgcagccaggccagaagggcctgcccaggccactttaacaggcttttaaagtaaaggtgacggggtgtccagatgcctcagcacgtaaaaggcctgtggcacaagtccaatcactggaattcggtcccagggattcacagaaaaagaccggatacagtggcattcgtgtgtaaccctagcacccctaagagatgggagccatagcctgtcggcctggagtgcaaagcatagcagaaatgagagaaacctgcctcaacaaggtggaaagagacccagctcctgaaagccgccctcacactcacatactctctatagatatctaactgaataggtaggtaggcaagcaggcaggcaagcagacaggcaggctgacagacagacaagattgacccatcccgtaccatgaggcagccagtttggactccagagccaccttccagcctcccccggcgccccccccccccagggaccccctggccctgtgcagacaccaagccctatccccaccacagcactttgaccacagctcctgggttctgtggggctctcaggctttccctgctggcgaggctgcagaaagcctggcttttgctactcctaggaaatacagagctggtgtactcggaaggagcctgcagcttcaccgacagggaggctcgtgtgtctcacaggcttctccggacctccaactgaccttcttggcctgtatattcgccaagaaatgtcccactgtccatcggattcagagccccattaatatgcaaaactgccccattcgcccctttgacctgatggacagggatccccttctccatcactgccaaagatctgaagtccacctgacgcttccctgtatactgcagaccccgggaactccttagacctgacactgttctatagagacagcagtcaaggtggctgctgatttaggcacttccagccccatactccatcacaaaagcagaaatctcactcactttctccttttgtagcagaagaaaggatgaagtaattggccacaggcacaccttccaggaggccatgaccccctccccaccccaggctggcccctcaatgctgtggatatgtggcaaagcagtcttagcatacaaagatttatcctaccatggtctttgtggttcctccttggacccataataactgaacatcacaatagcagccctgtgggagggggtgggaatgtaagacggctaggacatcacaagtgtcataaaagcaaggggggcattctccagccattaaaaagggcaacttgctctgtattttcagatgcagccctttgatctcttgggaatcaccatcaagtctctggcagaaattgaaaaggaggtaagcatgatggattcggggctctgctcactcctctagggtccctgtctgtccatcggggctctgttctagaaaagatgggtgcaagagcccttctgagggaaaaactctgagtcacgttgcatgcactatgcacttgacatagactatgactagtgccttctctgtctcatcatttgccaccaggaccgtctcagagatttagtcaaacctctttatgatccagaagtgtatcctagatcccccatacttagccagacccccatgtgaccggctgatttgatggcatctgggcatcataagaaagacaccaggatcaggtgcctgagacggcgggtctcatgggggtctcactgggcctgctcagaggccagcaccagtctgcacatcctctcggtgcagggaagattgccacagtcacgtgctgccaccacagctcctcagagaggaacatttgtctcaaagatggaaatggcagaaccatttcaatatccgtggttccttggggttttctcgtatgtacccagccagcagaagcaggctgcattattgaaagatggctggaatcaaggaaaattgaatcaatgcagtacaacaaatttctaaacctgtcaaagcaaaaacaagacgaaaacctcctcctttgtctttgattctccgtaaatcataaaaacctgattgtcacctacagttttgtttgtttgcttgctggcaacagtggaaatggctggccacgatgctagaaatttagtgtgcagaatttcccatctacccttaaaatggttctgcagtccatctgctcaagaagagcattccaggaacccagcagacctcctctagggaggaagcccgtgggaccagggaaggctttaatagagtggccttctccaggtgcagaggtagatagagcagggtcacgtagacaggcattggagcagcctggctgcccaacccaggcagctaccccagtctgtgctggggtaatggaggaagccatctcaaaggtaccagccggtgccgtgtggacaggtgggaagctctggaggcagcaggtacccaccactgctgtgcactctgcaggctcagaccctgctacaaagggggcatcagtatccctcccctgctgtccacccctgctcttgccaccttggcccttggcagcagcatctttttcttaagcacttactggagacacaaccctagaatttggggctgtcttgttctcacccgtgtgaccaagtgaccttttttctcttttgtatgaggcaagattagggcctagtcctatcctatggctggaagtccctcaaagggagcctctccaggtggatagaaatagtgcgactcgaaggcccgtccaactgggttctgggttatgtgagtacataaacctcattgtcaggccggggcatctgatgccaacaccaaatcttctccctctactccatgggctggcccctagccaagcatgtccgtatggtgtattttcttcacctcagcactctgagttggggtgtggcttcttagactaccatcaggtgctggggacagcgctggatggagctcctgggcttgatcccaacccttctctgggcttttctgagccttctctgtcaggtggcataggaatgggaatgccagcagggctctgctgagacggctgggtttgtagcagggcctgagcctgcagagtgcacagcatcgcccgtccccaccatccacctcttcctagtgctggggcaggaggcagtgtccacccgtccaggtctgcagctgagggacgccatcggagttgtcagagccttgttgtttctcactgttagtcgtggtaaggaggcctgcctgcatttgctgctgagttacactaaaggtgctttatggaggatgagggaaggtggaggagcatcatcccttagagcaagtgtccccggctggcatggtgctgccagggtcagacatttgtttctctctttcattccctgggggcctggctgccttggtgaagaggcccagggcctgttagctgtgttctgcttgctgtttgtgttacacttgtcaaaccacggcccccaaactaaacagaaagaatccttaaggcaagggattacctctaaatttttatctacttatttgttttatggcagtgggcacctgacacagtgtgtggggtcagaagacaacttgcttaagtctgtcgtctccctccatcatgtgagctccagggatagaagtcaggttttcacacttggcgacaagcctctttccccagtgagccatctcactggcccaaataaccacctgtgaatttggggcacaggctaaagacctgagcatctcctaagatcctgcccctggctccgtcccacagtggggagcaaagtgtccagccaccctgcaaaggagcctgtactgagagtgaatgaacaacagagtccctggccctggctaaactgtcagcaggtggctcatgggaaaacacaaagagcaaaaggggcctgataggcctattccctgctgcctgcctcctgggcacagctggagggcagctagtcagtctgtccatccaacattaggctgagtatcttaatcattgttgtattgctatgaagagacaccatgaccaaggcaacttatagaagaaagcattcatagaaggctgacttacgtttctgagggtcagtccaacatcacgtgttcaacatcacggcaggaagcatggtggcaggcaggcaggggggcctggcactggagcagtagctgagcgcgccatctgatccataatctcatggcagagtaaaacccaagcctacccccagtgacacacctcctctaacaaggccacgcctcctcatccttcccaaactctccaccaactagggaccaagcattcaaatttgcaattttattccaaccacttcacggagcatgcgctcctaacacgccgcctagccatggggattttctgatgctcagtccagccccgtctgccacccaccttccccagcaggtctgccatggaggcgctgtcctgtcagcccaagaatggttagaaatggcctcagacaaatggctgcaccaaaagttcatgccagctgccagcaaggacacctgcctggtgcaggtgccaccatagtctgaacatacaccgagtcccctggtgctgcacaggcaatgtacacgttcaaggaagagtgcaaggttcatccccgtaggcagggaacacaaaggaaacagcatgcctaactggcagcatgaccagccaatcagcactcagactccaagttccacacgttcccttgtggatatggtagaggtgacatggtgtcatggaggggacactgcagaatctgcatgtctgtggtcaggtaccatgtgttgatggtttagattacatgatgcttttataggcaggacacaggtgtgcagtgaacatgtctgtggtcaagtaccatgtgtcgatctaagtgatatggtatcatggacaggatgcaggtgcccagtctgcctctgttagatgccacacctacctatggttgttttgtggtttgagtcagggtctcagtatataactctagcttgtcttgaactcacagagggctgtgcaggccctgtgtgtggaggccagacaaggatgccggcaggtggctccagggtcctcctctctcagcttcccagttcattcttctgagccagggtctctctgagcctaaagcttgttagaagccagcaggaatccagtgatcatctcatttctgcatccatgcccagacctcagagctggggagtccctttgcccccccccaaccccagctggagtgcaggccccacgggacagtgccccatagcatagtgtcactattgggcaccctccagctggcagagaccttcaagtgcctctgctctcacatccccagagcttcttggcagtgtggcacacccagcacttatatcacaggaagacacccaagaaagatggcgcttcaagcacttaccctcaggcagcctgatggcaaggagcagggtcatggaaaacgcaaaaaccacagcattcaggtgcacactgagacgtgggtggtgggaaacgagtgaagccatgattagtgaagtaactcagcccggatgctggcgctgtctcagctctcagcctggtcatacactcctgtctgctgtcttcagaggcctcagcagaatacctgtcaattgggtcaaggcaatagagtgatttttgctgtccctcctacccatgggaagtgaccaaggagtcacagcaaagttttctggcctgacacagtatgtcttccttcttgttttcttgctactgtccccacaaggccacactgcccaccccacccccaagcccagcacaagctgctccattgaggagcgaggaaaaaatgcaattccacagcggtccatgatgaagcatcttccctctgactgagtagatgggcatataaatattccccgtctccgcggctctttatttcccttgtaagcagttgtcccatttctccatctgatggattccctgtcacagccagggtgggcgtgccctggctgtcttggtcctctgtttccttccacctacctatgccgccatgggcctccatcccagtgctcatgggccaagatgcaggcgttgaaggctcatccgacacagaccctttaaatcaggagcaacagcccctggctgagagagccaggtgagggaagccagtctctgcagactcggcgtgaacaggctcacccagacacttcacggggtacgtggggctgtggctagctgctctctcattagcctaccttgcttcctgatggaacagacagcctccattttcagaggacttagaagctgaagaaggagagtctcattagcagagggaccatctaatattaatcaccccttaaaattgacaagggaggcagctcatttaaccacttaattgctacaggtttttatgggctgctgtttgcagacatatttaatgaagaagttataaatctaagagagcttaaaattttaattttatccctaaatattatccttgttctcgagtttgtagtcaggcctcaggagtgtagtcacgtgagatactctttaaatgaacatatttgctaactggcgtgatttcagtttttaaaacattggttccagcaattaggcttttttttttccagttcccaaatgactagaggaattcgtcttgattataattgctcttagccacgcatatctaatttgtgtctttttaagtgttaattagtaaacagttcgagctgacatctttatgtgtttgtgtgttgaaaaatggggcttattgcttatttagcttggggctgatcccgatagcatttacgtcactactcagaggtgaaattaatggaaccacatttggcagcgtgaggttaaaagaattttcaaattcaacttttagatgtccactttgttagggcctcttcaaatgcacgaggttagggtgggctggggagcctggtctgctggaggaaggccaggtagggttgcattcataatgaaatggcagcgtcccaactttatcacagcagagtgctcggatccagcccagtggttccttcctttctgcttttggaaagcattcctagtgcttaggaatgtgaactgatttgatgatggttgagttgcagccacagaaatatgtggtccctttgcaccatctactggtcatgtcttgaactgcactggattacatggctgcctctgctaggtgttcttcaccctgtgttctttgaacagctttattatcggccaggaaggcaaaatatttggaaaagcaaatattcctacctcgtgaaccaagtgtgattgatccagtagactgctataagctcctgtatattcttccaaggtcccagctgccatctaaatttttacagagatcacactggcttgagaccattcctatgcaaaacaaagaaactccaaaagacagtgcatggtgaggcaggggtgtggcagtcagcagaccgccagtttatcctgtgcctcgctgtaccgtcagcacacgtgcagtggctgcagctacaaagaaacttttaaatttgttaaagaacttagtaggtggcttggatgggatttttttttaagatttatttattattatatctaagtaccctgtagttgtcttcagacacaccagaagagggtgtcagatctcattacagatggttgtgaaccaccatgtggttgctgggatttgaactcaggacctttggaagagcagtcggtgctgttaaccactgagccatctctccagcccttggatggcatttctaaaggcctaaaagatgccttccaaagtgtgagggcggttggttcactgccacattctgctaaccacaggcatgcacccacgagtcatgccgcagaccagcgttaatcctcctctcccactgaagaggacctctctggtatggcaccatttgaagcagactcaggactcctcccagttggagatcattgtggggattgggggtcttccttgattttctctgtgcctcactttgtgaggcagcatcttgcactgagcctggaactcactgactgagctaggctaggctttgccagtgtgctccaggatctctcgcccaccactgggcttacccaccactgggctcacactggcctttccatgggcgcttgtgatctgaacccggctactcatgcttgcatggcggacacttttccaacagagctatctcctcctgtccaggcatcaacttttcaatacttggtgttttcccgacagacccatgcacacgcatgaaaatacaaactcagaaacatgtgaagtacagagtgaatctcccctgctgcccacctcagacacgcacatctaaccagtgttacaccagcaagctgcctacttcagacacacacatctaaccagtgttacaccagcaagctgcctacctcagacatgcacatctaaccagtttacaccagcaagctgcccacctcagacacgcacatctaaccagtgttacaccagcaagctgcccacctcagacacgcacatctaaccagtgttagttacaccagcaagcttcccacctcagacatgcacatctaaccagtgttataccagcaagctacccacctcagacacacacatctaatcagtgttacaccagcaagctgcctaccgcagtcatagctctgaaacctgctccccactcctgcacactctaagtccttcctcctaatgccctcccttcatcaaagaggcttttttttttttttttgctgctagcagatggagactgtatcagaagccacaactggccaaaatgcagtctgcagcccattccttctgctggccgaattccctgcctttaaaaaaacaaaacactttttcaagagttttatatactgtatttctatcactacacttccactccctttcaacttcatgacctcttcaattacacacacacacacacacctgagtccatcgagaattgctggtttggcttgtgtttagggatgaccacacggattggctgaccacataggattataacccaccaggggctcgacttatagaagtctggcactccatctctcagcaatcactagtcactgatagctcttcctctagtgttggaaccgtgtgaggttttccctgtcagctagtggcatcactgggcaggtcttgtccaagcagccacattgttgagatttaacaggtacaactatcttgtagctggcatccaggctctctgcctttgacaggctcccccctccaaacctccccatgccgtctgcagtgttcctcgaatctttagggtacagtttctatatgtttatcagctgggcctgggcaccccacagtcagacggcctctgcattttggccagttgtggcttccgtaacggtcttgtcttctgtgaaaagaagctttgtggatgaagagtgagagccacgcttctctgtgggcctgaggggaaggatttagaacgctgttggaaattattgtcactggcaacagttcgttcctttctagggcccatggcctcaccaaccacaggcatgagtttcctcatactgagcaggccttaagtgacgaggaggtttggtcacctctaaggtgcaggtgccactgctgcccacgggtgcatcttgccatgctgtccccagtggtgcttcccaggcctcacggctgagtgggactttgactgcttctccctggcagcgcacactggcagcccatgttagcacttctgtctgagggctgatcctcagagagaggcttccactcagctctcgctggactcctccaagtcttccagcaacagcagtaagctgtgtagcagtcccctctgaccaacagctcagtgagtccgcatgcttggcactgggggggggggttagtctgtggctttgtggggtgtaccctcactccacatgccatgcccttgatgtatgtacttagccagtcacctgctgagtgaatttgggctcatccccagtgaccctctctcagtgtgtgtgacttgatttgctgtgtgtgtggctttgctcccctgggtatggctttctttagaaggggaaatactagtttgctttccgagtggagatgagcccacttaagccccaaccaaaggagcacaggctagctttctctacattccagcccagcccagaggcgctccacggtccccacactggtctgttgtcacccctggctgtccgctgcttgctggcttggtgctcgtggcgtggtggtttccctccctttccttcatcttccccctccgtggggtgcatggcgtgcactcacccatgcagatgtctgtgcagagtccaggggtgagcatcaagggtccttcctctctgtcactgtcctcctaacgtttgagataaggtctctcactgaacccggagctgctgttctctagtgcagctggcctgtgagacccagggacactcctgttgctgctgcacagcgtgggcgtcacaggagcacagtggcaagcctggctgtgtgagttctgtgaaactcggcttttcatatgcacacagcaaacactaccttctaagccagtggttctgagccttcccaatgctgcaatcctttaatacagttagttcctcaagttgtggtgaccctctaccataaaatatgttgtcactacttcataactgtgctttgatcctgttatgaatgacagtgtaaacatctgattcgcaggatgtcttatatacacctcctgtgagaagactgcgcttcaaaggggtcgcgacccacaggttgagaatcacttctctaaggcattttttttttttattgtccccagcctctttttatttgcttttgagtaatacttttattaattctttgaaaatttcatacaatgtgttttaaatatattcaacctccaactcctcccatttccaccctcccacccaactttgagatttctgacttttgttttttggtttgtttggctttccattgagtcgtttgtgctgcccagctagccttcggtgacagtcatctgcctgtgtgtggccatcccacaagaggtcacattgacaaagactccttccagcacctagaaaataccaatattttttcatctaggagtgggatttcgtgtccaccttaagccctgctgcaaggattctggctggctggagcgtgcactggccttggcacgcccgcacagttgtgagctcatgtcctctgtgctggtgcctgggaaacaccgttttcttgatattaccatgggcctcggctgcttttattttttttagagaatttacttttagttacatggggatgtggcatatgcacaagagctcacctgaagaagccagcggtgtctgatccccctggagctggagttacaggcagctgtgagtcgcccaacttaagctgggaacagaacaacagacccctcttcctcgaagatcccagagccttgctgaggggtgtgacgcaaatgtcccctttagggctgggctcgccagtctcttcttagtctctgcgtgttcgtgaatggtggttcttgttgtctactacaaggaggagcttccctgattggagggtatgtcagactcttccctctctcaggctgatccctcccctctcaggctgacccctcccccccctcaggctgatccctcccctcttatttttttttttaagatttatttattattgtatgtaagtacactgtagctgtcttcagacacaccagaagagggagtcagaacttgttacggatggttgtgagccatcatgtggttgctgggatttgaactctggatcttcggaagagcagtcaggtgctcttacccactgagccatctcaccagcccccatcccctcttatttttaagagccctttatcctttaaagatggcaaccttgggctgggtaaatgttttggatttcgttttcatggcatttttacaataaaaaccactgcattcccttctgtattttatattttaaaataccaaaatattaaacacttaccaaacccttgatccatttggcgtgtactggaaagtaaagagctggctttatttctaaggcttaggcagttttccgctcattttcttctgtgagctctctgtgtatcttttcccgtctttccatgtgttcccgtgccttctgtgctgcctcgctctcacatacggtggcttagctgagttctctgtgtgcccccaggactttcctaattagaggcataattattccatcggaaccttacagccttccaaggaggggcgattgtacaactattttattgttttgttttattttgagagagggtcccgatcaatgtatagtccaggctggccttgagctcatgaatctcctgcctccacctcagaactggaattagagacttgtgccaccaacattccaccttccatcaacagttttcggtgcattgtttatttgcggtgcatgcatacagagggcagaaggcaattttcagcctcccaccaggtgggtcctagggatagaactcaggtcttcaggcttggtagcaagcacctgtacctgctgagccatctcaccatctgcctgagaggggaggggtccaactgagaggggaggggcctgacatctcccaatcagggaaactcctccttgcagtaataacaagaaccaccaagcgtggaacccacagagaatgagaccctggagagcccagccctaaagggaccattacacctctccccaaggttttttttgtgagactgcacagaatcacgggtgatagggtggctggcgttttacacgcatgtccacccgggtctttgtgtattggccagtgggaaaccaaagggttctctttaatgaattctcgtgtgtttctttctgctgttcttttgagatggggtctcaagtagcccaggctgcccttaaactctgtatctaactgaggataaccttcaacttccggtccccttgtctttacttcccagtgctgggttataggtagcaccatgccgggtttttacagtgcaggggatcaaacctaggcccagtgtgtgcagggccagatctgtgccgactgagccgcatgcccagcccctcctgttggttttnnnnnnnnnnnnnnnnnnnnccattgcttgcgccttctcatctgccgcatgtatagaggacgctcccagtgctggctgagattctggagcaggcctctcctgaactgaagcaacagtaatgtcgctgtccttgtcaccttacccacagaccagcagcccagacaccaccctgaccgctcgtgtagtgtagcacctgtccccttcctggtgtaccccttccctcagctggcccttccaggtccccaggcctctttagtggcgttacgttacccgtgtttgtcttttctcctgtttgagaattggccctgtgtttctctttcccgcataatctcactgggatgggtgcagcctctcagggccgctttcagtcacctgtggacatggctgtgttttcccccaccatgctctgagttcccaccccccagccccccacactgtctttgtggctttgtttgttttgctttgttttgttttttcaagacagggtttctctgtgtagccctggctgtcctggaactcactctgtagaccaggcctcaaactcagaaatctgcctgcctctgcctcccaagtgctgggattaaaggcgtgtgccgccccggctctttgcggttttgtatttgtctcttgtatatctgcgtgcatgtgtgtgcatgtgtgtgcgtgtgtgtgtatgtgtgtgtgtgtgtgtatgtgtgtgtgtgtgtgtgtgtgtgtgtgtatgtgtgtgtgtgtgctgtgtgtgtgagggtgcgctcacaggccagaatcggaccccatggagttggagctatgaatggtgagccacccagtgtgggtgctggaatgcaaactcagctcccttggaagagaagtaagttctctaacgactgcggcgtgtctgtcgcagtggtccttggccttccagtgctgcagtggtttactacggctcctcatgtcagggtgaccccaaccatgaaactatctcatggctacttcataactgtaattctgctactgttatgaatcctactgtaaacattttttgaggtgaaggtttgctgcgggggagggggaatggcccacaggttgagaatgctgctccatcttttgagttttattggaggccacagcacctaagagtggctaccacagtttgtcggcatggtggcctggagcacgcagcattgaaattaaagagctgtggaactgtagctgccgcagagatgctcttcaagtccgcattctctgtcagggctccattgtcaacactcctacatgtgcagaaccagagtcaaggtgagcggctggctttcgcaggtccttcagaggagggtttccacttttttttcttcgggtttatgggactttttaatcccacatgttaaagtacagcaattccccaagcagagctagaaaaagttgccaggcagaggtgacaaacacctgtattgtagcagagatggagtggggcaggacctccacaggataccccatgtggcattgcacgacctgcagcgtctcttcaggtgtttcctgcagtgacgtagaggagggtgtgttccagcattacagacagcccccccccccagtttttaatgtccaggtgaatgctgagatgccatctcaaccacaactgtggcttccattcacctgtacacacacacacatacatctccacagacccacccaatcccaggcctccccagcaagcaggccccacccacaggtgcctgcctgtgggaccacagcaaggggaggctgttctgtatccatagaggaagcttgttcccccgttctcagccgtgcagctcctctacctgtcattcactctcagcttttaatagtcgtgatatagagctttccatctgcttcatgaaatgtccccattgacagcgtggtattgctgccgctgtggtgtggcagccttcatcctctgcctagctgggaagtgtacacctctctccaggagaggcacggaggctgacagtcgctccatgggagtcaggtagcgtgtgactctgctgagtgtccacatggagagaggacagaaccggggtgctcactgttgtggcgctggtcatcctgccccattagaagcccagctcccccactttgcctgtgacactcttgctgggccttgctgtcacccagtacagactcacatagaaaacattgacaagacatggaccccagagtcctccccctctgtgtcattcagccctttggttgcctgcggactgcatgggtccagacgttcccagccctgcatgctaagtggaatatctagagtccctgttagagggcagatgcaaagtctaagctagcccatcccagaaatgcggtgcagcaggcccgctccacagcaggcccagcccacagcagacccaccccaatccttccccaggattgaaccccaggtccaagacacagcatggagaacatggagcccatgagtggaaagggcacctggcagaatggaggctcattggaggctgagctgtggatgaggaagggctgaggtctaaggtgtatttacaaatgggacacaggtttgagtgcaggctgtggcagtgcctgggaggtgagggataatggaatagcccaagggaggtctgaagagcaggcgggtggctgctgtgtcctgcccctcaacttctctcaccacacagtcgtttacaaagctcatcctcaagaatggtgtggttgaggtccaacaaatgtcaaccctcgagctgggggtggcggtgcgcgccattaataccgcacttcagaagcaggcagatctctgtggatgtagagccgaggctaccttgtcttaaaaaaaaaaaaagtaagtgaacttttatgatgttttaataaattacttttttgttctcgactgaattcatagctatcctgggctgtctggtctagcctctactactccctctgccctggcattaggccatctgtgaaagcccagccttccctccactgttctccacccctgaaccatctctctgctattctagcccacactccagggccttctgtgatctgctgccacgccacctgctttggctctggttgtcacctgaccccatgtctcccacctgcagcccatcaaggggtgggcatggacacctgtccagctcagcatttgctccaggctcccctctgggccaggaccagcactgtcctgcctcactctggggtctcaggaagttggatccttccctcagcatgcttcctgactgcagagtaaagagctagaaagaaaccttcctgcctgccttgtccccctgtggatgtgactggcactgaatcaggagaggacgagggcctgagcaggtacaacctgtgcatgccagccccacccccactactgccccgttggtaggcagcaagcacttctgagtcaggcaagcctccccttaccaatcattaaaaggacccaggacctttcataaatgctgctgctttccccatatcggcctcttgggcacaagcactgctgggtgtgttggcacagatcaccccagtgactcccacagctcccctgtgagtggcaggagaagctagtcacccctttccctggtggctgcagtgacctagcctctatgatgctgccacctcctcctaacacaatgctagtctcctgagagcaagggcttgtggagaccgtgacccactgtctgacctgtctgcctgagaggcctgaggctgtctattacaaggtcctggggcctctgggaaagtcccctacagagcctttgacagtgatatctctttcctaggccaagccagcactacagttgcgatgacaggctgtgtccaccagagggcaccctgcccttcactgctcagctggactgggctctgcacaccaaatgctttttaattgaaaatatttttaattcaaaaaggatttgctgtttgtactcaagtgcaggttttccttatgcaggagactaatgtcttgagtaaacaggcctgggctcaaatccaccttcaaaggtactctctgtttgcccaagggagtgaaagggcttccagaagcggccctagtctcttgggcaaacattttggggacgaagaatccccggtggaggacctcgtctgtgggaaggttatccgcagcctaagggggattatgtcgggggacatatgttgaaatttcatttggggaattagggaaaacaagagtgggggaggtgactttttccagccaggataacctaaaaaggaaaaagctccagggagagggcgggggccgagggatccatgcgtggtgccagcccccagggtctccgtgtgcttgggctgcagcacaggaaaaggcaagtgtgtgcttgccgctccttctccactacaagccagagtgcaaagaaaggagcgttcacagtgaactggaaggcaggtccttgcccctcccagagacccgctcccatgcccagccaccacaggcacggacccctgaccccacacatggaggccccactgcctggtcagccatgcttcccctacccactacccagaaagctgcagttcccatctgcccagcaccagtctcaggctaggatatcctggggcggggccaaccggacagcattaaatgaagaaagttccactgccccacaggcttccttctgccctgggagctgggcacagcacggcctacttctgaacagctcaggcagcatctccagccctgaccgcgttggtaccatgtgagccttttccttccctcatctgagaatcactgctggctttcaaagtgcgataccctaccctgcctgtccctagttctcctcgtggttcaccatcacccacctgaccaccgtagtctagcctctggccctcccactccaaccctccctacatcactgtggtcatgttggtcatgtgattggtcaggcttgctttcagaactgaccccaactccagtcacctagaagccactagaaaatgaatatttcagacccaccccagacttatgaccaccactcaaaatttcatcctagctagcctaggccttgcaggttccaggtcaggatctactgtatctcaccccaaggtgtcacttctcaggcagcccccaggactgtcaacccccaccccaagggtatagacctatcctctttgtcttctgactgcatgatggctgttgtccctgtggtccagctacctctacacacacacacacacacacacacacacacacagcctcccggggactctcccagccaccagtaaaactacaccctgtcctctccctagcctgtgccttctctgtctgaactgctgtcctgacatcccaggcctttgttctattgggaacagcccctggccctctaccctcaagtctctaccattaagcccccgcccccgcatctctgcccttccatggtttcgctctttcctgggaaaggctcctttgcttgggcctatgccttgtacaactgccctaggaggtggtggttagtcctcgactatatggaaggttcctgggcccctctgccaccacactatgagccctgggaaccaaggattccacaggacttatgcctttatagtcttcccaacatgaccccatcctccaaacattcctcctcccacccaccactccattagccccaacagagtaagataaagccaacagaggctggaatgtgtttctgttcactgacatgcatacaccgaagcagccaccaggtggcagtgttgtgccgaccattgcctgaagcgtcttgggtagacagctgcctatagcctgataaaatggtgttagcctgatgggatggtgtcctgtgccttcaagagtcactagaaggtgggaaaatggcagggggagctgtgggcgctctgataggctcccctcgtagccaccagctgtttaatagaaactgcttgccaccaaggaagggcctatgccacccttggaattggctggctgtaccccaccttagaagtgagtccaccaagatccagaacgggaagacaggactcacaggtcatatgggcactatcttgagtggctccttggtcatgacctcagctactctttctcagggcagctccctttgggggtgtgatgaggctgtttgggccacacagcctgactggggtctgcagcttctcctcctacagtttggccacactctgctccacaggctgagtaccatgtgggcgtccacacagagtgactgagctcaagacagcagttcatcaacctcctccctgttggaaacatttccagagcccccactgctcaccagttctgatctactgaacgtggttggaaaccgctaacataaatgcctctcgcctaatagggcaccccaggctatcccacaagccctcttcacctctgccgggataagaaatcctgttctgcagcccaccccacggcagggccccctcccaccccagacacttgtgtcttctcagagttttcactgggcttggagccttttgctgccagaatttactctatagaattaggatccgcactgtaagggttagtggtcctccatagactggctcttggctcaggctagcagggtggccagcagaaggcaggctcccacatcaccagttgctgttagtctgcctgtagctgtgagggtccccaccaggaaggctctgggtgccgtgagatccggctacagagggtgcaggattgtgagagcccagaagcccttccttcccttgcctctcccccgggtcactgaggtggctgtcatgggtgctgcacagcaaggggtcccaggacctgagggttgagagaggctggtcaggcatggagttcactctccggtctatctctgtctccgagagctttagacacaactggagcctctcagcgtggcacaagattctcgtgtgagcttgccattggcaccagtagtggacactgcgttctctctctctctctctctctctctctctctctctctctctctctctcacacacacacacacacacacacacacacacacacacacacacacacactttcatacagaatgaaacactatcccagctctagttccaggcctggatgcctgacctgcagtcgctctgcctaaggctcatcaggagcctcccctctgctcagcggggccttctccaggatcctgtggtctgactctgcctctttccttctcttgcagtacgagtacagcttccgcaccgagcagagcgcagcagctcgactcccacccagccctacccggtgccagcagatcccccaatcctgaggagcccacagcctcctgggggagaagacatctcctacccggtgcccagactactgatggggtggctggggtgagagtcactccctccctcacctgcccgttctgcttgccctgctcactggccacgagactctgggcagctgcttggtcatgtgtggtcatcagctcgcccgctgagacttccctgcctccctgggaccgttgttcataattgtgactaatgtatgtgctgttagtgaccagaggctcctgtgtgatgaccacttaccccgccaagaaagaaaactccttccttacctggactcacccatgaggggcccaggcacacactccagccgcccagtgacacccactggctcccctcaactgaccgtcacctaccacagaaatcccacaaagccactagctccctcctgggacattccagggttgattgcttcacttaggaccctgcaagatccactgatggcctctgacccagctacctgggaacaagcgccactcgccagcaggctccagtggcccacacatgcatttcatgacggcactaagcagcaggactaagatgcacttgagacaactgtggactcttccccctttccacacactggacgtccagagagcatagatgggaccccgctttctatggaggtgactgggtgcctacctggatggaaacttggctgctagggtactatgcccagtcacaggtgccaattcccacaaagggctcatctgtggagtgtccgacgacagacgacagctccataggcctctgcctggtgacctgacctggtggcagctggctctgagaagaacagtacagaggcaccaactcgtcacagccagacccaccccaccatctagaaggcaccttccaccagggagctgctgttttgaaaagcccttctgtcccaggcctcagaatttgggccaggacatttcacaggtgtcaacctgaggtgccaagttgaaccctccatgtgtcgccatgagaacagtagtcactgctgtcccagctctcagcctcaccaccatgcgctgctttgccaccattggcttttagggctggaatgacactggtctccagagcatctgtggatgtgaagatctgcccagtggttagaggccatgggcagctacttcaccagctggtacaaacctctccagtcacagctctatagagacagctgggtgtccaaggtgcaaaaggatcaggagcaagaacaagccaacaagatggcgtgagctggggcagggccaaaaatacctcaccagcctacaccagcccctcctccgtcccagaccctcaggcccagtcagccagtctttctgcttgatggtacttcatttctatgtgtcaggaagggtcaccttgcttcctcccctcagatgtgagcacaccctatggggtacccatcaaccccttgcctctgggccccacatcctccgggtagcagaggtccatagagtcaacataggcatctctagcaaaacctagtgccacgctggtgctcaaaggagctaataaactgacctaagactgctccaccagctggggtcccaaggatctgtgtctgcggctgcaggtgtgacatcaagtggcttgtgtggcctgaggcccaagagaggggttgaccaccgttgtctgagttaaccgggaaggttgggcacaaagttctggactctcctaacctcttcattgaagtctgtacactttggccactctttctgttcctcggttatgaaatcacttctgccacagggagccaggtggccctcctcttccttggaggagaatgtggcttctctgaagctctcgaaggtcctggcctggaagtgcaaaaccgaagactgtgggcctgttagtgatccagaggccaagtgaggggattcctggagaaagatctagtgctttgcagcccatgcgtgcactcccacaggactcagcccctggggggagggcaaagcgcccactcggagctggagcagtctccggatggacggacggacggatggttgctgcacacttagctgaagaagaaccctgactgagaatgttgtagcactgacagcttctagcttttgaggcgttgaggacgacttggtgtctgtggtaggttccaggttgcacccaacccctggtttcttgtcttctggtgatggtaatgatcgtgtgtgcttacccatgcccgtcttatgtggacccagtagacccagacctgacggtagagctgtggctcacagcagcactgagtggcctttgggtaccatgtggcaggcacactgtcagatgagcacaaggagacgtgaagagccaaacctctcccatgggtctccccctcccctaccagcatgtcccacaactgctactgtccctgcaagcacacacatctctcttgaaatgactaaccagagcacagttccctatccccaccgtcccctctgaaaacttggttccttcctgagggccttggaaatggcacatgggtaacaagtggggagggggttgggggtggggggaggggttgttccaggctcacttgcaaatttatcgtaagaccaaatctaagaattcctgtcagcctatctctgccacatggagagccccgctctcctcgggggaaacatgagagagaaccatgactcttcttcctggtggtcagcagcatatggccacctgtggccaaggtcatgctgaagcccctcggtcagaaggacgtccagcaggggactggggtcctgagcgcacacaccctcccttccactgggcttggccatcttaagcacatttcctgtcatcccccaaacaagcccagcagtgggtgcttttgccctctcacatgaggagcctgaggcatggctacaagcttgccagtggcacagacagaatctgaccacaaagaccctgggccaaccacccagcctttgtgtctgccctgtgggctttcttctgccgtggagatgccatcacgctgtggtagtggtccctggcatgggtcaggctgagagtctgtctgactgtcctgtgtgcccgcccacactgagggctccccagcctcagagcatcttctgccccacttctggcctcctggccagggaggaggtagaaagggccttggtgtggcgctgagccatgaagggctgaactcacagaagtggttagtgtccagccaagccctggagcctgatgacgaggctgggctcccattcctgctcccagctccctcaggtgacccgggtgccccagccttctccacctgctctgggcatgagcccttgaacaattgcagcatctgcacctggagacaaggctttgttccccttcaaaagcttatgaactgctgggccaccgtgtggcgctgggacaaggaccttaggcacagctgccttcctgtgtatttattcaaggtgactgcttggcaaagggaggtctcaatgtgtgactgtatcttaatataatttgttaaataaatgtttgttttaacctcgtttccccagtttgctgttatttttaaagccaccagaggtcagtgtccctcagaggaggccctctgcccagctgcaaactatccctcctgcttcccagagctcctgggggccagacagctactaccctagcctttcagaaggagttggcaggagacttgagggtgtcagaaccgctaacctccctggccctcagaagctcccgagtggacaacagggcctgaagagaaggcagaggctctttcatctgctactgtcctgcctctgggccttgggacaaagctaccctgctttgggcctgttctgactgcccaactgccacacgatgcctctgtaaaactgcagagaaggctgtgggtcccacacacatggagggcccttggaagaggcctgcagtctcatcatggcgcccctcacctcctggctgtgacttgtgcatctctggattggtctcacagctggactggctgcctgcagcttggcatacctcagtctcagtgggaaggagctagaatggtaacctttggttctccaaaacgtaggggcacctcaaacctatatgctccagtctccaaacccagccttccatctgtgaatcttttttcccccacattttcaaggggagccagggctagattctggttctggctctgtgagtcacttcagcaatgtcacctgacagaatgaaggtttctctccctgtggagcccccttgggaggaagatggtatgagggcaggcatgccatgcacatggctaagtgacatgtctggggcctgtgcagaatgcaaagctcctccttggtcctgcatctgggacactgggaaggaaatataagtgacacctaggtcatgggaagctggagccttaattgccaccggggaaagacagagtgagccctgatgcctgggccaaatgtgtcccatgccctccaacctaggccaacgatgctgaggtggccaagccaggaaccggttcacggaccgaagcagatgctgctgccagccctcatcagccaccactcaggcacctggcagcctcccactctccccacaccagagaccgtgacacccacaagcacgagggcacggctatgatttggatttcaaatgtccttcaaaagtgaagtgaccatcttagttgtcagttcacagcctctcccgaagtgcgaggctcacacacgaggccctgacccactgatgtgcttgtcatctgatgagccgttgagaggcgacagaaatggggcctacttgaagggactctgtccttggacctgcccttggtactgtatcctgtctctaccttccccttcctcccggccactgtggcctgagtggctctcctcagtcacccgctctgccttgataatctgtgtcaccccagcccaaagcaacagagctgaaagactacactactataatctgaatcctatgagagtaaacacattttgcatgcgggtgtgttatagcaagtgaaggcgaacgtgacctctgggattaccgtctcagtccaggattagctgaagtcccattctcatcccaaacccagagtcccagggcctggaagatcagctgcggggcaatctttaatctaaagctcatttgctcttctggctccagcaccgactggcccaacacccgtcccctgagctgccacattccttaggaaccctccccagcctctgatcctttcatctatcttcccaggggcacccctactctcactgcctaaatttccctcaccctaagaaggaagcctgggtctttcagagacctagtgcccctcctagatctgactcactccttctgatggccctgctaaatctcaggtaactccccacctagactccaagttgcctcctggtctccgcatcggccattccttctaccaaggacgcattaccctactcttctgcctggtaagctcccttcaaggcctgccttgaaccacactgcagcaaaggtgttggctctcccctcgagccaccagagcctgccatgagtacccacatgtcactgaactgcagccactgggtgctctgatctgattctgtgtctattttctcccctgccatgggtccaaaaagtggtagcatccataatgttcttcgtgtatgtcacggggaatggacgtggcagacaggagctgtgagcagatgttagaggtcaggggaggatagaccctagtagtgccataaggtccctcagtggcctctctgtgctagtcttgatgtgtcccagagagaccataggccttgacaggtttgctgccctgggccctggcgtggctccaagcttgccaggcctcagtggtgtggtggtggtggtggtggtggtggtggtggtggtggtggtggtggtggtggtggtggtgtggcggctgctgcggctgctgctgctgctgctgctgctgctgctgctgctgctgctgctgctgctgctgctgctgctaacaggtaactgacnnnnnnnnnnnnnnnnnnnnnnnnnnnnnnnnnnnnnnnnnnnnnnnnnnnnnnnaacctaatctaacctaagccttgggactctgtttcctggttctgctatttcctgcctggccttagtggaaacggttaagagggtgtgggaacatacttatgtcggctgctgaaccctgtgctcccatctcccctcccccacaccccagactagggagctgtggccagaccagacaacagcccttggcaatggcagggctgaggcagagacctagaagtttcagagggtctcgaccccctgactgacccctttagatggcctaagatatgtctatctcccactccccttgtccacgggagggagcatgagacagtcgatctgagctgccactgggagtctttagagctcctcagacgccaacagtagaccctcagcccagggatccaacaggaagctctgcagcaggcagtaagcccaggggtcctgcttccagcaggtgatttcaaagtgcagcttagatgaagttgtctaagactccacgcttgcccagttgaggtttggatcttcaaagccctcagaagcccacttgttagctgcttggttggcagcctgtttaagaccttcaggaagtcagaggaagtaaggttatcaaggatgtacaccagagggaattgtgggagttccctctcccccgcctctctctctttcagtctctgtgctccctggctctcatgaggtgaacagacttcctctgccccaggtaccccataacaggatcaaagcaaccagtccaaggcagaaggatcaagaggttagggtcagcctgagctacatgggaagttctagactgcttggggttatttggtaggaccctgtctcaagaaaactaacaggactggaaggatggctcagtggttaagagcactgactgctcttccagaggtcccgagttcaattcccagcaaccacatggtgactcacacccatctgtaatgggatctgatgccttcttctggtgtctgaagagagtgacagtgtactcatatgcataagtaaataattaaataaacatattttttaaaagaaaactaaccaggaagtaggcacattgggagctcagccacctataactacagctttgggagtctaatgcctctggcctctgaggacacctacagatgcagacatacccccacatagacaggcagacacacaaacacataagaattagaatagaatcttttagatacactggagctgagggcataactctaagaaagagtacttacctagcacgggtgagtctgtgggttcaatccccagtaccagtagaaatcttaataataataaaccacaaataataataaaaatactaaaagaaaaacaagcacagggctggagagatagcttagagactgagagcatataatcatttgaagaaaacctgagtctggtccccaacacacacctacatgtaactccatctccaggggatctgacacactcttccagctactgaggagcgctacacacatgtgcatgcatacacacacacacacacacacacacagagagagagagagagagagagagagagagagagagagagagagagagagagaaataattattatattaaagatctctttccacaccctcaaaatatcctcaaatatcctacagctgagtttactccggttgctgctatatagagctcacatatagtgtcatctaacggcccatgtgctacaggcttgctcagtctctggggctgagcttttgggaggtggtgagtctgctagatgaggcctcttgggaggtcttcaggtcactggtcagagtgaatagtggaagtctatcccctcccctttctctcttgcccccattcatgaggcaaaaggctctgctctgttccagcacaggctcaaagcagcaaacctctgcaagcactagccaggaaaccttttctctttgtaagcagattggctcaggtggttgtgatagtaacagatggagaactgagccaggaaaccttttctctttgtaagctgattagctcaggtcgggttgttctagtaacggacagagaagtgagcatatatgaaacaacatgccttttctgacacatctgactctagaatacaggaaaaggaggaaggtggcttaagttgatcttaaaccaaataaggacaatcaatacacataaatcaaagtcctgttttgctttggagtctgagtaccaaattctctgtaaaatagcatataaaactgaatccacctacatactcaaaaataattatgactattatatttcatctcaaggatgcaggaggggccaaagagaggcctcagtagttaaggacagtggttccagaagacccaactgtctataagtccatacctagagaatctaatgccttcttctgacccccaaaggcaccaggtacatgtggtacacacacatacatgcaagcaacacagtcatatacttaaaataaaatcttaaaataccattttaatggaaactggagagatggctcagcagttataagtagtggatgctcttacagaggcctagccatacagtctgaccatggggtcagttcccagcacccatactacagccagcaaccacctgtaactccagttctaggagatttgatgccccctctggcctctgtgagtggcaggtgcaaacatggtgcatacacatgcatgcagacataatgctcatatacataaaaataaatcatgtatttaaattcaagactcaacattgggaagggggcctgggaactctacatagtgaactaaaagaaatacggcacaggcccctcgcacgatgcagaagacacatttaataaacacctcctgaacctccaacctcaggatcaggctaagtcaaggatgtatgcctgctaccaccatttcctcacggtgcactcgggacatgagccaatgccacaagacaagaaaggggaaggcaggatatggactggaagggaagagacaaagctgtcgtccctgtcctgttatacaatcacctgtgtagaaaaccaaaatggatccagcaaatgattagaacgtgtgagggatgcacaagggtgtcagatataaaaacagccgtaggaaatgaacagcgttcctctctgtatagtcggcaaccgaccaggaaatcaaacagaaagtctttcaaagaggcatagtgtatgggggtgggggttgaggggtctaataaaaggcaagttgtctgtgaagacctctgagctctcttgaaagcagaggatatctaagttagcagaagtgtcctgattttgtattattatcgtaacgcatatgtgtgtcatgctgtgtgtatgtctgtaccacttgcatgcctggtacctatggaggccagatgagggaagagggcattggattccctggaacttaagtttgagatggttgtgagctgctatgtgggtgctgggaattgaacccaggtcctttggaagaacagcgagtgttcctaactgcagggccatctcttccatcttgaaaatatcctataccttaacattctaaaaccattttatactttgtaaaagcatgaattgttacccttatcttagattctacaaccagagtcattttgacataaaataggctcttggtgactatttgcttgttaaattggtgcaaaaatgctgcctttcccttctaatatgctcagtccaagtcagcaaaagaattacgcaatttaaaaaaatcatagtttcaaaacagaaaaattcatgcgagaatcctactagcacttgacagttattctaaaatgctaaagtgtgtaataaagaatagaaatctgtgctaagcttttccaaactgtttttacgtttatttgtggatatgcggaaagacactagtgacaagatgtatgtgaaagtcagaggaccatttctaccatgtggggcctggggattgaactcaggtcatcaggattggcagcaagcacctttaacccactgagccatctcaccagcccaaccttcgatgattctggcacgtgtatatatgtcagccagacttctcgaatgctaggcaagtagaacttttctaagttatatatccccagccctaagcatgttctgaagaggattcattcttccagacagatactgcacagctaatgaagaccatgtgccaagggctggtgagttgccttagtagttaaaagcactgctgttctgttcttgggaggactggagttcagttcccaaccctcacaccaggcagccgtcagtaacctcaggggatctgattaacacctttgacctccatgagcatcatac

SEQ ID NO: 1215 - DNA, 1217 bp, Mus musculus
cttgctcactcatgtaaacactgggtctgaattgtttgctctccacttccttttccaaaccaggaccaagccaccatgcccgaagtcaaggagctttcagaagccttgccagagacaccgatggaccccatcacgggagttggggtggtggcttcccggaaccgagcaccaacaggctacgacgtggttgcgcagacagcagatggcgtggatgctgatctctggaaggacggcttattcaagtccaaggttaccagatacctgtgtttcacaagatcattttctaaagaaaatagtcatttggggaatgtgctggtggacatgaagctcatcgatgtcaaggacacattgcctgtgggcttcatccccatccaagagaccgtggatacacaggaggtggtctttaggaagaagcggctctgcattaagtttatcccccgggattcaactgaagctgccatctgtgacattcgcatcatgggccggaccaagcaggcaccgccccagtacacgtttatcggggaactgaacagcatgggcatctggtaccgaatgggcagagtgccaagaaaccatgactcgtctcagcccaccacgccctcccagtcatcagcctcttctaccccagccccaaaccttcccaggcacatctccctaacactaccggctaccttccggggcagaaacaacaccagcacagactatgagtaccagctctccaatctatatgccatatcagcaatggatggtgtgccttttatgatttcagagaagttttcctgcattccagaaagtatgcagccctttgatctcttgggaatcaccatcaagtctctggcagaaattgaaaaggagtacgagtacagcttccgcaccgagcagagcgcagcagctcgactcccacccagccctacccggtgccagcagatcccccaatcctgaggagcccacagcctcctgggggagaagacatctcctacccggtgcccagactactgatggggtggctggggtgagagtcactccctccctcacctgcccgttctgcttgccctgctcactggccacgagactctgggcagctgcttggtcatgtgtggtcatcagctcgcccgctgagacttccctgcctccctgggaccgttgttcataattgtgactaatgtatgtgctgttagtgaccagaggctcctgtgtgatgaccacttaccccgcca

SEQ ID NO: 1216 - protein, 286 aa, Mus musculus
MPEVKELSEALPETPMDPITGVGVVASRNRAPTGYDVVAQTADGVDADLWKDGLFKSKVTRYLCFTRSFSKENSHLGNVLVDMKLIDVKDTLPVGFIPIQETVDTQEVVFRKKRLCIKFIPRDSTEAAICDIRIMGRTKQAPPQYTFIGELNSMGIWYRMGRVPRNHDSSQPTTPSQSSASSTPAPNLPRHLTLPATFRGRNNTSTDYEYQLSNLYAISAMDGVPFMISEKFSCIPESMQPFDLLGITIKSLAEIEKEYEYSFRTEQSAAARLPPSPTRCQQIPQS

SEQ ID NO: 1217 - DNA, 199597 bp, Homo sapiens
aaagtacacttggaaaaggaccaagcaggcgacttcagagatcaagtgtgcggtttggccttttgacttggggttttatacgtgtgcgtattttcagggtcttgcttctcttatcccctgattcttccgttgggtgggctgtccacatgcacagtggcctgctagcgcttgggaggggagcatgcgcactgtgtttactggagttgtacttatgctcactcgagacattcctcccttaccagtctagcattcctagaggaagatcatttaccagttaaactccaccattttgcctcttaatgcttatgcttgagcccactcgcccaactcctgagatcttatttggaagctgctgatcaccagtttcaggtgttctctgactgttagaagactacctttccctagcaacggatgttaccaattattattttacagagacagtcaacaaccacctgaccatcacctgattgtcacctgacattcctgctgtatgtgtgtgggtgggtgggggggaacactctcctgccctgctcatgcctgaccagctacccactgtaacagtatgattccaactagatgatattctggaaaaggcaaaaaggtgaagacagtaaaaaggtcagtggttgccaagggtcaggagggagagaggaatgaacaggcagaacacaggatttttagggcagtgaaactattctgtgtgatacgctagtggtggacataaatcattatacattttttcaaacccatagaatgtataccacaagaatgagccctaacgtaaactatggactttgggtgacgatgctgttttaacataggttcatctgttgtaacaaatgtaccactctggtggtggatgttgacagtggggaggcacaagggggcagtagggtggcaagggtggcaaacctctgtactttctgctcaacattactgcgaacctcaaactgctctaaaaaatagagtctattaacaaaaaatagttaagaccaaaaaaaaaaaatgtcatggcagagaaatagtctgaaagaccatatgttttttactttttttaaaaaaagaaagcttcctggaatgggtgtgaatgtgaggaaggcttggaagataaagccagagggtttggatactaattgtgggatggggtgagcttgggatggggcgagctggagatggcacagccatgctccttgagttccagaaccaactgaggtggggttaggggctagtagaggagataagcaaacagaatcataacacagctttgggccaatacatgggttgattttcccaggaccacccattttcttggcaacctgttctttctgcaggagcagctgtgttctttaatgaccctgtccctctaaatggccttgatcaggccagagtggtcacctggtcatagctaggcccattggaatcttttcccaggatttttaaagtgaatcttagacagccaatttttatttagtggtagaagcaataagaggatataaaactgtcagcagtctgattctgccatgtggaagaagaaggtctgtaatgagagaatgaagctgagataaaggaagctctgggtttctggtgtcagttcttcctgagtacacctgcagccctaaccttcctgaggtttgcctggcccagggaagtgggcacatagatgtgatgcgatcctgccctctgtcccagtttattgggtctggggtagttctgacctttactgggcctgtcagatcatctctctgaaagtctggaattggagcttagagatgccttgtcactgtctgcaggccactgggactgatgtgatatagactgtgggctgagaacaccatcatggcagcaattgttagactgtggacagggaggagaagaagagaaaagtcgttgttagaaagggcaaaaaacaaaggcagacacagggaaaaggggaaacaggaggaaacatagccctggaagaggcctggaaatgtgcctgccgtacgagactgcttccgtgagagaatcccagtttgttccatgaattctgttttatgcctaactgggtttgagagcatttctgttacggaaaaccaaatgatcactgaacaacatctgaatctccctacagcctgtgaatatcttgagggcacaactgactctgctcgtctctctaaatccagaagcttggcctggactcccagtgagagagtgaagaaacaaccattgtcctgagaatcagggctctatccaacacaatgcgcttcaggactctggaaatcctgctccagagttttgtaggcaggtgcagtggctctcacctgcaatcccagtgctttgggaggctgacggggtaggattgcttgaggccaggagctcaagaccagcctgggtaacacggcgagatctctgcctctaaaaaaaaaaatctaaaaattagccaggagttcaaggctgcagtgagctaggattgcaccgctgcactcagtctgggcagcagagtgagatcctgtctcaaaacaaaaacaaacaaaaaacaacaacgaaaacaaaacaaaacaaaaaaacacaaaaaaagagttttgtagagtgaagttccaagcatcgactttagagtctaatacctctaactcctactttccatgatataacttaggaaagccactttatctctctgagccccagtttttgtagttataatatggcaatcatactccctgctttacaggatcagtgttggttattgagtgaaatagtttaggcagaaggacctagcccagtgcctgacacagaggaaataccccgtgaatggcaatgatcatgattcctaacagttgcagataaggaccgacattaattcaagaattatttgttgagtgcctgctaagtcctagagtggtaaataaaagagacagggctcctcaggtgcctgcccctgtgaagcttacaatctaaagaaaggaagtcgcttttgctgaatgctgtctttgtaccagctctctgcggcacaaaggccctctctattagggaaggtgttgaaacaatcacaagttggatccgttattctgtggggcctcagtgtcataaaagcaggtctgcatgtgtttatggcttcttcatttcaacagcactgtttgtgggtatcctccgtttatttctcacatccatccagtcaaagtcttgtgaaagtgagcctgccacatttacacacctgtcccacaaacatgctaatcccacctgcctgctttctgctcctaccagcaggtcaaaaactgtgcagatcagggaaaagttctgtttagccagcaagactcataactgaggagattttacccttactctttcaaggcagaatcaatccattctagttcccgcagatcaataccagaaaacagccctaggagtaatgatgtatttattatcataattgagagagcccttaaagagggccaaaaaggaaggaagtgagtggtggggatctgagctccaggaagctgcccgagttggccctggacctgtgcaggtgaggcctggtaagcatgaaggcctgctttgcacggctctccacccttaacccatctctttcagaacaggtactatttgtggcactgaacactttctgggatcttatcatgtatgaaatgcactgacattttttcccctgattataaaggtcatatagttcattattaatttttttaaaaacttaattgccttcttccttgataatgaaacagtgatttttttttttttttttttttttttttttttgtattggcctggaaatacggccagtctcaggaagtgactgccattgacaaagccaatttcccatcctcccttgcagtgaggaggggcaatgtgacccatttctagccaatggtatctaagcaggcctggtggggagtttctgagaaagtttttgctgccaggccatgacatctgaagctgggggagtaatcctgcacccatgaggcaatgacagaaaagacatcaagctgaagatgtcaaagaagtgtggatggacatgtattcttaatggcttcattctttcttaacaagaagactgaagatgattactggccagtaaaataaacacctactgttcaagctactgttggttgaattttctgttatttgtatccatattcctaagtgatgcaaatatgctaaaataaaaaatgatagtctctgtgtaaaccattcccaagacgtagccactgttaaacagttaacattgggtatatattttttcaagaattttatgcatatatgaatacatataaataatcacaaatacatataaaattgatgggctcatataataaatgcattctgttctagaacctcttttttacttaacaaaataccatgatatatttctatgtcagtacagcttttttaaatgactcaatctattgctagacatttaggctatgtccaatattttctcattataagcaatgctgaaataattatccttgaacatacatctgtgtgcacttgtctgattgtttattgtggataaattattagacatggacaaagggtacacacatattaaatgttgacacatctatctagaaaatgtttattgaggggctagtatgtgtggcacacttatgcttagtgaacagaacagatatgtctcctgtctgggtggagctatttgtatgctgggaagactgacagttgaacaggttaacaaatagtggatggttccaaattgtgatgagtgatacgtaggaaatgaactagtggggtatggaaataaaagggacctacttagatagatgacccatgaaggcctccaagagggtgacatttgagctgagagctcaaggatgagaagagcccagaccctataagactgaaaagagtgctgtaggcagagtcacccagggaagaaagagctttgatgtttaaggatctacaaggaagccagttggttagaatggctgagaggaggatggaggggaagctgggtccatatagcatgggaccttgaaggctgtgctggagcatttaaatcttattttattttatggaaagtccctggagggctttaagcaagggagcacctgctgcatttttattatttatttattttgttttatttattatttatttatttattgagatagggtctcactctattgcctaagctggagtacagtggcatgatcacagatcactgcagcatcaacctcccaggcccaagcaatcctcctacctcagctgcccgagtagctggaactacaggtgtgccacaccatacaaagctaatttttgttatttttcatagagatggagtttcatcatgctgcccaggctggtctcaaactcctaggctcaagcgatcctcctatcttggcctcccaaaatgcaaggattacaggtgtgagccactgcacccagcacttattattatttttttattttaaaaaagtatttatttatttttttagagacagggtctctctgccatccaggctggaatgcagtggtacaatcatagctcactatagcctcaaattcctgggctcaagtgatcctcctgcctcagcttcccaagtaactaggactacaggttcacaccaccatgtctggctaatttattattttttgtggagatggagtctcactatgtttattgatcttgaactcctggcctcaagcgatcttcctgcttcagcattctccaaatgctgggattataggcatgagccgccatacctggcctattattatttgttaatgattgctctggttgctactttccattgtttgggtagggcaaagccaggagaccagtaaggaaattactacagtggtctaggccagaaaatatggtttggagtagggtgtatgaaatatacaaatttgtatgccttatttgtatacctatatacaaatagctcaatagattaaaatggatattcctattatatacaatagatgtataatatacaatggatatacctatttttataggaatagttatttaaaaatatacgcattctcagcaaactaacacaggaacagaaaaccaagcaccacatgttctcactcataagtgggagttgaacaatgagaacacatggacacagggaggggaacatcacacactggggcctgttggggtgtgggaggtaaggggagggagagcattaggataaatgactaacgcaagcggagcttaaagcctagaggacgggttgatgtgtgccatgaaccaccatggcacatgtatacctgtgtagcaagccttcatgttatgcacatgtatcccagaacttaaagtaaaaaaaaaactatatctacatctatatctatatctatacacacaaatagatcaatggataaaaacaaagcatttataaacagaacttaatatatgacaaaagtgtatattcttacactagtggcccatagtttcttctgaagttttacattatattgtaatatttgttagagcaatattttctcattattcttccatttcaaaaatttcatgggtatttcctcatacttatttatcaagataagtttcttgttagtttttttttgttgttgtttgtttgtttgtttctgagataagatcttgctctgttgcctaggctggagtgcagtggcgtgattatagcctactgtagcctcaaattcctgggttccagcaatcctcccaccgcagcctcccaagtagctgggaccacaggcacacaccaccatacctggctcatttaaaaaatctttttagagacagggtctcactatgttgcccagtctagtcgcaaactcctggccccaaacaatcctcccaccttggcctcccaaagtactgggattaccagcatgagccaacacactcacgccaatcaaggtaaattttaaaataatttcatcatgttccatctcacctcacccctcagatcatagtggtttcttgatctgaattttactaaatttataaagtgagttggggagacacagcatctttgcactgttgagacttcctgcccagggatttgttatatttttccgactattaagatcttcttttatgtccctcagtcaggtttgtagttttctttccatggaccttcacatttcttgttaagcttatgcctagtatatgccttatagtattcattgctaatgtgaatatgctttttttccatcatacttcctaaatggaaataactggtatttagtgttgtatttggaggtctctgtaagtaatacctccctccctattctaagtttggaacaaactggggcatagacacaggaaagagacataagacaaaaatactaccttaatttttaatgaagctgactggaaaaagtagcttttgctctgtagctaagtgggcttgctatatttctccctgaattgagtagatttatttgtgtagtggcgggtggtgcaggagaatagtatcactctgtccctgaaacaggttcacttaacccacagtgagagcgcatggaaatatttgctctctgcagtcagccaaatccaaaaagagaactcagaagcatctattcttgtccactttttccaaactcactcatcttcccttagagtggagagaggccagaagtcttattctaatggaagtccctctatatggaaaagaaggcttctcccttcaataccataagacagggtaaggaagaaaaaaaagaataataataataataataagaagaagaagaagaagaagaagaagaagaagaaggaaggagaaggcttctcccttaacatttaggaaaaccattgattttggtgtttatcttataactgaccaccttaccaaagtctctatgatttttagttgattttttttatttttactttttgggaaacacttaaatcataagcaaataatgacaattttatctcttcccttctaatatttatatttcttatttatttttcttatcttattgcattggctttattctatagccattatagcaggcatccttttgactgacttaaatgagaatacctttagtgtttcaccattaaatatgtttgttgatggcttctgataaactttgtcatgttaaaagtttaaactttcttcctataatagtttactaagagtttttagaaatttatgggtcattagttttgaagtttataaaatacttttaaagcatctatcccattgataatatcctgtaatttgttttcctttaacaatgcaatgcatttacaaattccctaatgttggatttttcttgcgcctctggaataaatcttgcttgatcatggtgggttttcagttgctttaatagtaaactggattcaaatggctaaaattgtatttaatagttttacgactattatatacttaaatatatagtgcagattcacatattgaagatttatcagtgagctttagaaggtggtcctggctcagatgagtttgggaaatgccaggttaaacaaaccaaacaggtttctttactcctggacttcacagaggccttccttaatatacgaatacttatcgtgattctccaaaaggtacactataaacggcatgcagcactttctcaagttgcccacagaagcccattttcaaaaaataaatattaaattctctggggactcgtgttctaggttagtcatctgcagttctttttggtattgtctgttggattttggtatcagggttatgctaaacttgggaaatgaaataaaaatttttgtttcttttgtttattttttcctgtgtaacagtttaagtaacatagggatgatctgtgccctgatgggaggataaggcttgctgtaaagccatctgaacccatggcatttctgagtagtgaagacactgggaatgcacacgtgcatggcttccctacaggatgtttcccccgacagcccattctgcttggcacccttctctttaggatcaaacagctattatggaaaagcctagaatgtgtgaaaatgagactcaatgcattagcaaatcaatgctgatcactcctgcatggtcctcaagtcctaacgaatgctccagcctcctggcaggaaacctttcaaatcttgcacacgctggcctctgcctgggatgcctggctgggcggtgtggggggcatggttggttaaggcgcagagtccgcctttcctaccagccactctagctgagggtcaagctctggaccctcccccaaccatccagctccattttatccttggcttatgccttccccaagtactgcagggtaggactcctgctaaaaacttcttctagatgcttgcctgaggctggccccataaacctgattctaggcttctggggataaatcatctaactaatataagagaattgctaggcaattggggttagtttgagacgactggctgagctcaccttaggtgagctggggggtgggggaagatgagctgaaggattctagggttcagtgaagcctagaatggctgggtgggcggagagtccttagaagggtccaacttctagcctgagggcctgggggcttccagggatctgcagccgagcggaagaccggtcttgcgtacagcgaggcctacgagagctaagtgggctgagggtccctggaaaagaccagcctgggggcggggaccatcgatgccccaggctctagaggccgtgggctcccgggggcctgaggctggactggggtcgccggcgggctcggggaggcccgggtgggcgcaccggggccctgcctgcggctgacgggctgggtcgagggggaggctggggaggcggggtgccggccggggcggcggcgcgggctcgggacgccagggctccctctccctcctcccgcccgagccagcctcgggcgccgggcgcctcccccgatcctgaaccagcgccagcgccgggaggcccggagcccggcccgccgccgcggcccgcggagggagccgccgccgccactgccgttgtcgccgccgccgccaggccgcgccccgcccctccgccgccgccgccgccgccgccgctctcggtgaggctcgcgctcgagctgcggcgccggctcctgccgcctgggccccgggcccggcccctcccgcgccgcccgggcgatgagaagctgcttctgcgtgagacggagccgggacccgccgccgccgcagccaccgccgccgccgccccagcggggaacagttaagtgaggcccgggcgccgcggaggctcggcggagccggccctgcagccgggagggcgggcgggcgggcgcgggcccccggccgaggggcgggcggacgggaggagccgggccgcgccgaggcctgcgggctccgtgcccggcccgcggcggggacaggcccgggcggcctttgcagagccccgagcgcgccgcggctgccggtgcccgggctcggcctggcggcgagaggcgggagaagctgggggacccgagtgccagcagcgcccccaaggcccgggcaggtgaggggcgccgagagccacctctgcccgcgtgagagggaggcggcccacctgggcacagactgggaacagtcaatcgtttgaccggcctggcctggggtcctgctctctctggtcacgtgggtgcagaccaacgtgcacctgccccaggggcatcactgcctctgtgacctgggcacagcagagaggacacctaaaccctcaggcacctgtctgcaaggtgacatgcccagcctgggtacccgagacccagagcacccatccaggaacatggtgggcacgtcgagcaccctacagtgactccaacaccagcgagacgggaggagcaggggctgggacaagagctgaggcatggcaccaggggacatcacatcctcagaggcaggcaccagggaacggggtagacccaagagcatcttttgtcctctttgttaccaacacacaactgttctaaatcagcagcccttctcaccatgaaagatgagactcttctgttccctgcccctcaacacctcttgcacaaggcactgaggaagaccacaggagggcaaaaggcaaatggtggttgccccttccctgcttcctgcccccacccaagaaccagagcccactccgattgctgccacaaaagcagacagcagaccagctcctcttaggggcctttgtctctcgtggttccttctcagtataatctcattgtacatttctcgacagctggctggatctcatctcgttttaacagggctgggaaatcttatcagcggcaccaggaaagcttagagagttaaaaaataagctctgtgaagccttgactaactgaaaaactcaatgtgctaggatgtttagttacagtagatggtgacacctttcttgcttgttagaaatcatgtggggtccttggagatactgtaccatgctcagaatctttaaatagggcctcagagagatgaggcttctgcttgggacccgggctccaagccccatgggaagcagttgacgtggcgattactggttcatttaaacctaaacttaccttctgtaatccatatttttcattccttccttctaggctttaggtcacactcctaatttaggttcaaggcatttttcttgccctgtctccatcctgctagggaccttttaccacttccaactggaatgttgtgccatggttatgtgcagggagtttagaattagccctcagcttaagtcttggctttcctacttactttgtgcccttggacaaattattgaacttttctgagtttcagtttcctcatctgtagagtgaaactaatgatagtattcatctcatgggattatggcgtgatgtaaatgaaattttgcaagaaaagtctagctcagtgcctgctacatggcaagaagtcagtaaacggtaggggtcattatgagaggtttgttaacggatgaatgagaggagtagcttatttatttatttttagagtttctttctgtctgctttttttttggtttttgtttgtttttgagacagggtctcactgtcactcaggctggagtgcagtggtaccatcatggctcactgcagccttgaactcctggactcaagcgattctcccacctcagcctcccaagtataggtgcctgccaccacgctcggctgtttttttaaattattattatttttagtagagttggggtcttgctatgttgcccaagctggtcttgaacaccagagcttaagtaatcctcccaccttggcctcccaaattcctgggattacaggcatgagccaccacgcctggcctattatttagtcttcaacgggacaaccaggaagtgatggtatagtagaaagaacactggacttggatttaggagcttgagtttgactctcaggctacctcctggaccccaggtgaccctaggggagtcacagaacctttctgaatccccatttctgtaatgtaaaagtgtcttaagaacaaagcctaccccataaagctaatcagtcaagaagagctgaaggagctaatgtatgtgactgcacttggcactgcaggaggtggcggtcctcatgaaatttaagtgtgcgattcagcatccagcagcagatcatggtgtttttttcaggtccgatgtttatacagtttgttgcggggagagcattaagaaaaagaatacaagaatatcctgtgtttgtacatgttacagaaccacgccaccatgtgagcacactgctggatgccctctcagggccttggaaggggtaagggagaagtgtagtctctatccatttcatggaggatcttctcctggggggatcagaatccaaatggcataggcccctctgtctgagtttgctggaagtgctccatactcaaagggagacatccttgccacactgcaaaataatgatggtgctggagtcaagcatgggaaaagtcgaaggtgctattatgatgatgaagataacaaatgactacatggctggatgtggttaggctgagcacactgtgttgcagagcctcctttgcaggttgggttgtggaggggaggcctgggtttcttgaatagactccttctccccaggctgctctggctctcaccgaggcccaccctggccagcatttccccaacccaccccgcccccaaccccggctctccttggccttctgcttgctgggctgccctagggaatcgtggcttccctgcgctgtctgcactagttgcagtgggtttgccagagtcaggtctcctgtctccggctgcctgggaggcaaagccactgcagagtgtgcttgacattacctcccttgttggggacatcctgtgggcatgcatttggtttacttgacacgcttctggcgagatgcagagcttgtccaggcagaaatgtgagagccctgtgggcctggagcccaggggttgcacatagtagctttgtggctcatacttcccttaggactggagggccatcttgttggacctgtggcaggagtcaacacgagtttgttctttctttctttacacacacacacacacacacacatacacacacacttaaaaaaaacagattctaatcagcagagcagaatattcaaaagaatatcccctgatcctttagaagagagaaataaatgagtttgtaatgcactaaatatgcctgtggtgttgatgaaaatgcagattctaggacctcatactcagactttattgagtcagaatctctggggaacgggacctggaatctgcagtcttaacagacaccttgggttatacttcttcttactgaaattagagacctacagttcttgatgctttctaaaaaagtgttaaatacacgtaacataaaattgaccatcctactcatctttaagtgcacagatcggtggcattatgcacattcacactgtggtgcaactaagctccagaacttttcatcttgcaaaaccgaaacgctgtgctcataaaacaactttgcatttccccctttcctgacccctggcaaccaccattctgctttgtgtttctgtgagtttgactaccctaggtagtcaaactgtgtgatcctagtggatcatacagtatttgtctttttgtgactggcttgtttagtttagcatactgtcctcaaggttcatcatgttgtagcatatttcagaatttccttcctttttaaggctgaataatactccattgaatatgtggaccatattttgttcattcatccatagatggatgcttgggttgcttctgtcttttggctattgtgaataatgttgctccgaacatgggtctacaattctctttgagaccccgatttaaattcttttgtgtagatacccagaagtggaattgctggatcatatggtaattctatttataattttctgcggaaccaccacactgttttccataacatagtggctgtgccattttacattcccaccagcagtgtgccagagtttccaatctcttcacatgcttgcgaacagttattttgtttgtatgtttgtttgtttttggtagtagccatcgtaatgagtataaggtgagatgtcatttggatttgcatttccctagtggcaagtgatgttgagcatctttttgggtgctggttggctattcgtatattgtctttggaaagacttgttattcaagtcctttgcccatttttaaattaaggaatttgtttttttgttgttgatttgtaggagttttttatagatccacatattaactcctcatcagatacatgatttgcaaatatttcctcccattccataggttgcctttttactctgttgattgccttttgctgcaaattcttgatgctttctacacattataaccctgtagaaacaatattatttgctattccggttttatagggatggaaactcaggcccagtttagtttaacttgcctaaggttgtacagtaagtgtcagagctggaattcaagctcgggtcccttggactccaaagggggcacccatcccattcctctgctctgcctgactttccccccttagagctaatagcataaggaggccccatgggggtctgaaggaaggggcgttggttggagaaatgttcagttgcaggtggggaagtatgaacggaaggcctgggaatctcttccattagaccactggggtgccccttcctgtagctcaacatcattgcttagatctcagaaacagcagagaagtgcagacaggttttttagttcagtttgattgtgttttgtttatttgttttcttaagcattttataagcttgtttcagagcccatctgctccttgcagttccccgagcagtccctgtgtgttcacaccacggtgcctttgttgaggctgtgtcatctgcttgcaagactttcaccacttcacacacccccgtctttcagggaggccagttctttgctcacctttccctgcgtcaccaggcagaaggaagagtcccctcctttgcagtccctttctcttgggatatttcccacagcctgtgagttccatgtcttattcattgctctatcacccagcactgtggagcttctccttggctgtgcactctccagtctcagtcccagcctgaaccaattaaatgagaacctgaggatagggaatgggaaagctgtgcttctacaagctctccggggcattcttcctgcagccagcctgggcacccactggcccctgacaggcccacatccagcctggctgcactgagttagatctaaatctggaactccctggaagtgctgcagtcccttcccccgtcctctgtaagtggctcacccctggggtcatggtgtgtgtcctgtatggaggaatcagtgaccccagaccccgggctttcactggaaggggtctgacagctctgctgttcccccgcccctttatgtgcccctgcccctttatgtggccccacccctttatgtgccctctcccctttatgtgccctccttaatccagtgaaacttggcaattttgagaggataggaattttgtttgtttatccttcccccattcattcataatccatttattgagcacccaccataagctgggcattgtggtggacataacacacctttgagtaacttacggtctgctagggaaagcatgttctagccttctgagaggaaaggctgtgtgtgtatgtgtatgtgtgcacgagtgcatgtgtgcacatacgtgtgctaagactacgtgcttgcatgatgtcaggattctgagtggtggcacctgtctgactgggaaattggagaaagtttgaggggaatggaagatgtgaccctggtgttttgttttgtttttttttgagacagactctcactctgtcacccaggctagagtgcagtggtgcaatcttggctcactgcaacctccgccacccaggttcaagtgattcttctgcctcagcctcccgagtaggtgggactacaggtgcgtgccaccatgcctggctaatttttgtatttttagtaaagacaggatttcaccatatgggccaggctggtctcgaactcctgaccttgtgatctgtccgcctcggactcccaaggtgctgggattacaggcgtgagccactgcgcctggccatgaccctggttttatttatttacttatttatttttttgagatgaggtctggctctgtcacccagcctggagtgcagtggcaccatctcagctcactgcaacctccacctcctgggtttaagcgattcttgtgcctcaccctctcgagtagctgggattacaggcaccaccaccacacccagctaatttttgtatttttagtagagatgcggttttgccatgttggccaggctggtctcaaactcctgacctcaagtgatctgcccaccttggcctcagagtgctgggattacaggcgtgagccaccatgcccgtgtgtgaccctggttttaaatggtggggtgggtatctgcaggggaggaacctggtgcccttgggtgaactgtcaagaggaaggagggggagactggagggctgattctgaggcttttctccatggaagattacctttaggttcattccatccatccatccatccatccatccatccatccatccatccattcgttcatcaaatacctgatgaatacctgctctcttgtacttaaattttggactgtagaccagctgttttagtgtcagctgggagctgttacaaatgcatgttcttagaccagctcaggcctactgcatcagtatctcagggggtggggttcaggaatgtccgttttaacgacctcttctggtgatttttgcacatgctaaagttggataactcccactccagaatgtggactttccgtctcattactgtagcctcagtgcttagcccaagtggctccgtagtcatctgtggactcactgttcacgcgccaggccctcttagagaccgggaatgtaggaggatgcttcagggggaagatggcaaggtcagctgaatttgaggtattcctgagccatgtgggcaaagacgcgagacagatacctctgagtctcaggagaaaagcctgggtttgaggtattttggaagtcattagcatatgggtagaatgattagatgaccaaatatatgaaaaaaaattctcaagacccatgtgaaagtcagagaggggtgtggtggcctggctggcctgaagacaggtgttctgatgattctggcaggggcccccatttgcctggcactgaaattatattagtatctttactgtatgagcaccgtgcccatcagggcaagctgtgactcctgtcaccaaacactcaggaaccattgcttttggggcctccaggatggtttcatttgtaggcatctgccttctgttggggtcctttttttctccttctctacaggggacaatatggcaccacccagcaaaacctgatgggagtggacatggactaccctcatttgcagtaatcatgggcaagcaggtggtacccacagtgtactggagaatgccctaccctcgagtaatgttccctggtttgtgcagagtcaggcctgtatggggcagggctttggccagggctgtgctgtagaacttgatcctgaatttatttttggaaagtgaatcctggaacctaccattgcaccataagggctgcagcaatctgaaccctagtcctgcctcatggggtttatgcaaaatctgtttggtaatcaaatggttaatagaaatttaagcataaggcagattgaatacacacgtgcatacactggattcttctgttgggggggaaaggaagtgctcacaattgttagttcccgagctggaaaattctttgcgatctaggagagcttagaaaaatatttgccttagttgcccaacaacttagcagccctcctagcagctagtgacttgttgccacctgactatgtccagcagcatttgtcagagtgatttgactctggctggtcaccaggtaatctgtccaaagttcagaaggtgtcaggatgctatcctgaggctccacagtgacagcctctcagtctgtgcactgtcccccacgggtggccccaaagccagctgcccatttaactgggcacagcatggacactggcctcagctctcagccttctgaggaggtaggtctctgcaactttctgtaaggaggtggctgggtttgtgtgtgtggtgtgcattggtgaggcctggccacaggttccctccttggggacaggcagtcccttgcctgtccttctgtcccttgcttgcaatttgccagcagaaaggtgtcagtaatcccggggcaccagaggtgggcatgtattcctacagaccatcgctgccaatgggaaacaggcaaagaccctttctatgaaggccggagcagcagcttttactgggggacaacccatttccagcagctacctgctcttgtggcgtttcctacggcgaatgaaatgtttattcttcttccttcctcagccctgtaagctggtatatgtgagcaggcagttttttgtctttggtgcccttgactttggatttcaagcaagctgatcacaagtttgcccttctgtagggatgtaattaagccactggttttgtcatttcaattacagtagcccaatttagcctgccccccgttaatactttgaaattactctcctcaaaagttgtatgccagtcatgccttcagccctgagcagcagcgctggctggcgccgcttctgagctggcctcaccatggcaggaggccgagatggtgggaggctggaacgtgggcccactgcccagggcacctgctttgaaggcagcgccccctgccccctgcagttgttgctccctgaaagcactttaaactcctcggcccacaccccgccgctggaagagccttggtggagagaggtctgagctttgttagttgggttttgatttcagtacaggagttgataaaacgagataaaccccaggctcaggagggccatggaaattaaacagagatgatatcaaagttcccctgagttttcaactgtgatacagtagctctgttttctcccagactggggccgggaggcacacctttgattccgaaacaatgttcagcatcagttaagcccagcactgctgactttcagggattaaacacactgttgtagtaattctttgatcagctacaagggagcagtgtgccgtctgtatgaagggtctttatagttaaagttcatttctccgtgaacccgggatgacaaccttggctaggtgctgcagtaccgggagctggggcctccccaagcgctatctgcagcactgcaggcagaagctggaagcaggcttgctcctggctttgttgtgtggtttgcatggtgctctttgagcatggcatggtggaaaaaatccttctagcttggaaaacacttcaccttaaccctccccagctttcccattccgtacacttgtgggcgcacatacatgtttgtgtgtgcacgcacacacacacacacacacacacacacactactatcctgccttgccgagggagcctctcggggcagacaacactgcctgaactgaggctctgcagcccccagccttggaaattatctcacagaggctgtatgcccgcttaggggagaggtcagaatggaaccatctggacctgatgacctgcgaggtgaaagtaagaggacctgctcaaggtccagtctgagtccctggcatcctaccacctttattccttacccagcatgtattgagaatagacttagattggcccaatcctatagttctgaaaaatttcaacatttgtcttgtcatccaaaacactgggtcagctttgggggttccctatagagaacttcctcgcagccacagctgggatggcacaagtttccccattttgcttccccctcctcctgattggccctgcaacttccagttggtaatggagcccctctgagctgtcgatcctgctcgcaccgtgccatagatcaacctattccctcctgtgcggtgcttggatctccctcattaggcctaaatttacctccatcctacacaaacatggccttagctcatttttattgttgtaaattatttatgaggggaatgttgaatcttgaaactgaggtgtgaggaaaattaatcccgtgttacttttatccttctgtactttttcccccttgcttgacttattgagctgtggctagagaaagaaaagctttggcattttaaaatataattagtgttgaaactgctttctcaattggatgggatattggtgcctctctgcctagtacaatagaaaacagaccagacctagggaggaagaccagccgtcccattcctggaaggtgacccggccacctcccaggtttgatgtgagcctcaactgggaaggagcctgagaaagcttctggagagctgcaaagcgctgtccaaatgcaacagacctgttagtgtgttttgcgggcagtttgggctttgagatacagatggatgctggatgaggagctgttgatacaacctggggttgttgccagtaggcctccggatttgatgtgagagggcccgcatgaatggcctcctcgagtccttagccgcggggccatccttcctggcttgaggctccgcgcggcctgggaaatgtggagcgctagttaataaatggccttttgttaggaaggtcaattgaagtgccggtagagacgcagttaaaagtaatttgcagtcagaaaatatgtaattcagggcaagcggctttgagtgatggcccctgccatggatatcttgggcgtttctcattaaaagctgccttggctggtgatggcgcttcctggatgggtcgactgcagcccgcgcggcccggagccatttgtccatatttcacaaaggccgcctccgtccggggcacagcagctggggggaaggagggagaacggctggcgttggagatgctctgcgcgcagctctgcagggccctctggcaggccaggcccggctcctttgtctgcctcagccgggggccgcccgcagccatctttgaaccttctcctgggccgccacagggcattgtgggagcagcatggcttcttccagggcatggtgaccctcctgctgttgagagcggactccaggcagagggccattgtcatcatcgtaccggggaggatactgtgaccaggggatgtggcaatgaatccaccagcaaataagatactgcttattcatgcttacccccacttctctctctcctcctttttctttgtcactttcttttctctctctctgatagtagaggccatactatcttaaaaaaaaaaaaaaaacttacctcacatgttctttattaaattcacagcgtgatattttagcactggcagaattcgtacattctgttaatgagttgttaattgcaaagcattcttggtaaccaacagcaggtaccaatattttgcaaactgcagcaatgttattttcatgttaccaatactacgggatttttcaagtgctgagcccttttgatcaatgcctgctctggatctgcaggtgcagatatttaattctaaacctttactggggacatgcactaagtaaatattcactcaaatatttacttagtgcctactgtgtgcaggaagcactaagccctgtgttttatgcagataaacctgcctggtaaatgaaacttgaaaacagaaaatgatgcagtgatgcagtgtggtaccccctgccctggccgtttagaagcttattttcagaagaattaggtaaagcataactttgttaagctttgttgtaaacagaagaggagactgcagctgtgccaggcacttcctagccttgatcgaggactcagctccattgcattgacaagtctgtttccggagctttttgtgggttccactgacttcatgggagacttgcatacagcattttgattgttcctatttagaaggctgcagtcatttttaatggcctctgccttttctgattctaggctagaagcaagaatattcctcctgcctgcttagtgaggtagggtgtttggtttgtattagaagcagtaaccagccttgagagatctggcagacctgcagccagtggagtttaattgttgcagaaggaggtggaatttgacttgctctttttcactgcttgtccttttaaaagtacttaggttcatttacatatggtgttgcctcttttatttgctttctggtgcactgccactccagctgcccagacccagtgctctctatattctacctgtctcctctggtcacatcaagaggcagtcagcagcagaataataattccattttccctccctttctctcaaagtgcccagcaagaattatgatcattgttagtatttggctttgagtaagtgcccacatgacccgagggtaaaacacaacaaagggatctgccagtcccctatggagtgacgcctatcacatttctgaccagttacctggacttgtgtgtcccaaaccccaccagttttatgtgctttttttgagcgcctactgtataccagggacctctccaggcctttcatttacatccactgtctttgactctcttggtcctcacagcagctctgcaagggtcagtatcatgacctccttttatagctgagaaaatgaagggtccaggaggttaaattgcttactcaaagtcaccagctagtcagtcatggagcctggactccaacaccattccttcacctgagcccagaacacttatttctgtgtttgcaacattccttgcttctttgcaaagctctgcgtgctgaaggcctaaccttggctgtgggtttggaagtctaggcctccgtaggagagattgcaagggagagagaggaaaggtgttgttaagcttagccgtgtctgacatgtcttcagagcagctactggtatctgttcagaaatcaagcagctggatggcggagttaagaatgacgtgctcttgggtttgagtcaagctcacctcctgagagtagagacaagctctcatcttagctcagtgttcaaagctaacctgagaagagtgggaaacagaggtgatttgaattcttgacctggggaaagggtcacatagggtcaggactcattcaaccagtacaggtatgtgaaactcagggtatttgccccaagattctggttctgtttgagactttatattattcacataaatgctatgtttgaattttgtgttttctttttcctttgctgaaccaggaccagtccaccatgcctgaagtcaaagacctctcagaagccttgccagaaacgtcaatggatcccatcacgggagtcggggtggtggcttctcggaaccgagccccgacaggctatgacgtagtaagtcaagatactagtttgtacattttgctcactgattctacaagtatttatctcctgtgtccaagaccttctggcccttgcgtgtaagatgtgcttcttccctctaggaacttaatccagggagggcgtggagagcatcctggtttgggagtcagaagacctgagcccatctgggccgtttcctggccttgaccacctctgtgatggtcattttcaccttctgtaaaattaaggagttagattcattgattttcaacttctggttgtgacatttcgtgaaaaggatccagagtctatgaacgactcctggtggttttcatatattgtcatgcatgtgtaaatattgtaaaggcattgtcctacgtctgtgtagctctttacagtttaaaatgtttcctacccatgaactcatttagctctcttgggcttttggaaggctgggagggcaagtagctgtatcacctctttgctgattaggagaacccacgctctgagaagtcaagtaacagagtcccagtccttggatatggtgaatcatcaggaccagaccccctccaagtccagtgctgtggctgaccacaccaccacagtttagtggagaactttccttgcttttcagcagacatctgtgctggtgttcagtagtcctgatgattggaactggttatgttgttgtttcagtaggtaaattctgattcgggtggagcttgcaaagtacagaggaacgttaggagggtttaattaacagtggatattatcatgtgttctgagattctaaggtggtcttatgtttactttcctcactttgtttgtgacgttttgttcttattcactgaaaatgtgcaccaagaatgcataagagtgaaagaacacgaatctcattagccaacactgaaaacctcccacagcaattagaatagtctctgatgtcctgcagtgaggagaatgtgatgcctggtccagcagaagaagccctaaggcagggtttcccaacttcagcactgttgacatttagggcaagacaatccaataattctttgctatatgttttcctgtgcatcgtatgatgtttagcagcattcctggcctctccttagtgaataccagtagcacctgtccctcctcccccagtggtgacaacccaaaatgtctccagacgtagccagatgtctccaggagcagggggtggctgggcagaatcaccccccattgagaactgcaatggtcaaggcagatctgtactgagtcagccagtgctgggtcctgggtaaggaaggaggagcctgttcaaatgctacacatcccttctccaactgtttgaaagctcataaacattttaaaagtgaaaaagtgaaggaaacttttctgacaaacatttcagtcttagctgctgcttgacttcaaagtgtggtttgaatgtataactttccataaaatagaatcattaggtatggctttgtgccacgaaactctgggggaagctaataaaaatgttcctgatttgagaagccaaagtgtcttttgatgaattagggatgaagcagcaagtcatgaatcaaggcagggactgggagttcccgctgtgggagaggacgggctcaggggtcgctctcctaggagggctctcagggagcttgagcccaaggcaggggtctccccatcttcccatgccctcttttgttgatctgtatctttagcattccgtttgtacctttagggtcatcctgcttgcctgggtagtgggtggcagatggcctttgatagtttggttttctggaagtcttggtaagtctgacaggagcagaatctatccctatcattttctcctaacatctagctcagggcagaagagcgcagtgtcaaatgagtaaaattaataagcacatttcatgattgtgctgtgccatgcattttagtgggaggttagcagggcaaggggcttgagctcatccgcccggtaattacccagctctgcacggccgaggtggagactgcctgggctccctctgaaagccctaacagggagagaggtgggagtcccctcttggtactggcctctggactgtgtgcagataagcgtctcgttccccagaggtctggccccaagttcaaggaaggcggggagggcatggtgagaagagagacttctcattccttttatctggagtttcatattaagtcaatatccaaaccaaagtgcaaggcgctctgtggtggctaggctgcagagatgcttagacagaactccagcagatgaggaagccctgctgcggattgggccgagacctctctctgtctgttgtagctgctgtaggattaatttctccctgcgcacagagcccgttaagtactgccaccacgcagccctgcgagttaggcaccagatggactggtggccctgagtagcacaactgctttaaaatgagcttaggtcccattgctgcttgaggtaaaaggtgccaaatgttcatttataaaaatttaattcaataacttcccttctctctgggtcaggggagccttcttaggctagggggctggggattatttgctaaacttctcaatttattgttccgacgtctgcggtcctctctgaaagagcctcgcttttctgttctgcacccacactatctgggagtgactggtgcttctctccccttgcagtcagagttggggtgagtctcgtgcatctttgtgatgccacgtgcccggagtagtgactatatgtcatagatgactagtgtttgccaaaggtagtgcatgctgttttatcctgggtggatggtcagttttcgaagaattgtaatgctataagaagcacttccggctacaatgcctgtgtgcagaatgtaacctttgatttacaagccactctgggatgttgcagtgtctaaagggcatcaagctggacattactgagaatcattgttgggtgtgtttccagcaatacacattttacctttcacccacattcctttgcctttctaaataaatgcttatggccaagcatggtggctcattcctgtaatccctgcactttgggaggccgaagtgggcagatcacttgaggtcaggagttcaagaccagcctggccaacatggtgaaaccccatctctactaaaaatacaaaacattagctgggcgtggtggtgcgtgcctgtaatcccagctactcgtgagactgaggcaggacaatcgattgaacccagaaggcagaggttgcagtgagccgagactgcgccactgcgctccagcctgggcaacagagtgagactctgtctctaaataaataaattaattaataaataaatgcctacaactcagagactgaagctgcaacactatatttatgagatgactctttttccataaaggacatgtcttcttttccttgaaaatatacttttcttggtaaaaaaaaaaaaaaaaaatagcaacacagagaaagtgagacgaatcaaacactccagaacattttaattttaaattgtttatctatccaccccattttttgagtacctactatgtgccagctaggagctggggagacagcgatgagcaaaacacacacagctcctgccttcatgaagcacacagtctggaggggaagacaggcaatgatggttgcaaataaataaaagatgaaattgggggtaagtgctttgaagggaagtccttatagatgatttatctttcagatctagctttccagataattctgacagcatgaaccccttgcatcctgcttcgaaaaatcactgatcattcccttccttccatacctggaagcctgctaggtgttggagcctttcgcaggagactgcctcaaaggtgctcacagttcttcagcgccagctttctcccctgctaccacatggcgccttttttgttggtgacatctgcgaggttgtcccatggctgggttcagctccctgctcacctggcagctgctgctctggcctttctggcctgtgtaggggttggacaccgctctccctgcgtctccccctcctctgtgaccctccatggtgtcttagtccttttgtgctgccatgacgctatccctaagactgagtagtttataaagagcaggatttatttcttacaggtctggaggctgggaagtctaaggtgaagggcctgcatctggcaagggcctcattgctgcatcatcccatggcggaagtcggaggggcaagagagggagagtgagcaggagggggccacacacatcctttaattgggaacccactcctgggataagactgttaatctattcatgaggacagaaccctcagaacctaatcacttctcacaggtcccatctctcaacactgttgcactggggataaggtttctagcacatgaacattgggggcacattgaaagcatagcatatggcttcccatagagcagctgagaccaaacttacttttagtgagacctttctgggactttggggataatgggagtgagatattaaaactcagaggatcttgacagctgtggtgggggtccaggtccatgctcagacctcttcctagccagccctgtgtcttgctgttggctgccttcatcttgcctacctcagaaaagcattgagagctgccacaccttagcagccaggctaaactgcatcctggtcttagactaggagatattttattcttttttctcactccaatttaagacctcctccattctcttctggagaaatcccacccaacacacaggagtctttctggcaaagtaaccctgaagtgacagatcagcctcaggctccgtgactctttctgaaagtccaggtaagggattcccaggcgttagtgggcctcagtcccctggagggccctgcatcagagttcctgcctgaagggtgctttgcaccttcgggcatatctagaagagcaaaggcctgatgataataagcataggtttcagtggcaggcaaggagccactccccaggaggtctctctgataaccacctataggataaaaatccaaattctttgatttggctttcatgatttcagtgtatcttacagtcttacttccttctgctcatcctttctccagaaccattgaacggctcactttctcacatccagaataagcaggaactttgtaccattgtacctttaaaccctctttcttcatgtttctgaaatgcctatacccagtcccccaacttttaagtaaaacttttctcatccttaaaatccaggttacatagccccttagtgaaactttttctgaccattactcattcatttatttatttgctcattggtttcacaaatgtttattggccacttagctattgtccaaggcactggaaatccagtatcctgagaaggctgggctccatcaggtgagaggtgagagatgaggatgggcaggtgggtgagaccagatcatagccacgctaaggaatttgcaattattctgagggtggtgggagtcactgggagattttaagaaaaaagaggctcttagacagatgtgtgttttcccaagatcacttggttggcacggaaaacccttcgggggaggataagcagtgaggcaggtgggcgtgtgtggaggctgtgaattcgtgcagagtgagagctagagcctgcgccaggctattgacaatggacatgtgaagcagtacgtggatcctggggctgtgggagcgtgggacgtgggaacccaaatatgtatttttgatggcaagaatgggttgaatgttgggaggtgggggagtagggaggaaggggaaggatgagagtgccacaggatgtcttgctggccatgggtagatgctggggttctctgctgggacaggagcagagacagccaggtcgggtggaggcgggagggagactcttgggtcagttttgaacaccttgagtttgagctgcttgtatgacatctagcggagccctggggctgaaggtctggagagaggtctgagcaccatcctcatatagcaaggactgcgggcataagtgggcttgtctagggagggttgtgggactagaagagagggtgtgccatttcagactccactaccgtggagggtcactggttaaggatgggtagaagaggaggcactcaaaaggggactaagcctgagcatctggagaggtaggtggaaaattaaagaaaactaaggggaaaagtgtatttctgtaagaaggagtggtgagtaatgttcaaagttgccgaagtgaaaggagcctgaagggtgtccattgggtttaatgcaaggagatggttgtgaacttggtggcaagctcagaagcaaggttagagtggacctgcaaggtaagtgggaggtgacaacgagaggttgagagtgcagatggcctttgaagaggggaggccagggcatagcgggagctagaggatgccatgaccccagctagaggatgccatgactccctttgttaaaggtaggaaagtgtcgaatgtgtctagttactgatgagaaggaaccaaagaaagggaggggtgtagatacaggagagaggggctggctgatgaggcagggcccttgagggggcagaggagttgggacccagagcccagtctgagaggggcaccgggtcatgtttctttagcccttgccctgtcctgcccctgcacgctgggaagccagccttgggctcggcctgtgcgggcagcacatgggccagctgccctgggagtctccacttccccttttttgctgctcccgcctccccccatgtctctttctctcaacactatttatttctgaaactaattagacaaaagaaccttttttaaaaaaacaactggacctgtataatttatatatgcccaaaacgtagtaggaatttcctgaatacttggagtttcaaatgcttgaatgcaaatatgcgggactatgggggtcctaggagaggtctgcttctctctgggccagtgggctgggtatagggaacatagggagggataagtttaaaatcccaaacctccaaatgaggtcctattcttttacttactaaagtaagagaaggaaaaagaatctcaatggtgatacaagttcaaacaagcttgcatttttatatagtgctcaaggaatttttaaaaatcacgttatgaaaaacatgtgaagatggcaactatatcttgttaaaaacatatggcagatatcaagtggaaatgtgggacattggcatatcccgtctgagcacagctgtcacatggattttcagaaagccgaagctgtggtggggggcctttcagggggcaggaaaattgccctcgttctccatgggctggaggatagcggcagcccaaagcctcaggcagttagttgcccctcctggaactctgcctccatgaagccaatgaggaaacaagggcagcagcttgttcttgctgtcccagcttcctgagcacagggctttgctatcgtggggctactaactgcagaaataaccacagactttgagtcctgccacacagattggtttattttcaaaaccagagcttgttttgataaaaggcaccaggtgttcctcctttttgttttgttagaaaatacattaagctgagatttactgaaatgcggaaagtggtttttgtaactagccctgggcctttgttccctgtggcctggattagcaaacctcttttaaggtccttccctccacattcccctttgtcctgccgcaccctggccccaagggagcagagctgtggtctgagagaatgcacgtggcacacttagcacagtgctggcatccacgaggtgtgcaggaggcaaacatcagctatcgttaggtgatcctcttagaaatagtggcttaaagcacctggttgcagaggagctggtcttgttttcttctaggcttcccttccctgctaaccatgaatttttcgttttgacccaaagttcccgctaatgacttgttccgtagttgattcatttggaaagtggtagggaacaggcagtgttctggtacttccttctgtttgctaaaacttcctaattccctatttaaaaagccttctaataatgaaacgtcaattaattggatggttgaaaaaagacgaggcgcttgctttaatttttctttcttttttttcagttaaactttttattttgagacaatggtagactcacatgcagttgtaggaagtactacagagagatcctgtttaccccccaccaatggtaaagtcttgcagactagtacaatgttacaaccaggatactgacattaatacagtacattaatacagaacatttctgttttaaaacgtgcccaggtttttgtttttattcatatatgatgtggccaataaatgaggagaggattgccactggaaagattattactcgcagttcccaagaggagcagacaggccacaccctgtagggccacctggggaagcacaggtggggaaacataggtggggaagcgtggggtgtgtcaggaagcacagagagccagggagaaacgagccaggaagggcagtgtcaagcagggtgagcacagttaggattgattaagtttgaataattttggcaggtcctggggtacatgggtgagtccctcattgtcaggtacctggccctggggtgatttagggcaggggaatcgtgtcctggactgcaagagcccgtgaaagcaggcagatggagataagaactcagtattggttggtttgcatatccaaggcatgcacacaagcaagtcattcacctaggaggggcagtccctccctgcttctgcaagacctcaggatatcaaagcctcataaaatatagaaaaaacctgccaaaatacaatttctatcaccataaggatctttcatgttgtcgttttatagctacactcacttcccttatactaccaccttctccttaacccttgatagccactaatctgttctccatttctataattctggcatttgaagaatcttatataaacggaattatagtatgtcaccttttggaattggcttttaaaaaaaactcagcataattctcctgagattcatgcagagagtctattgtgtgggttaatagtttatttctttttactgataaatagtattccatggtttggatatcccacaatttgtttaaccatttacccattgaaggacatcttggttgttttcattctggagccattatgaataaagttgctataaatactcaggtgaaggctttcatgtggctgtgtttttattcctctgggataaatatccaggaatgcatttgctgggtcacatggtagttgcatgtttagtttttaaataaaatgttaaactactttttggtgtagctgtaatgaatatatgaggatccagtttctcgacatcttttccagcatttgttatcgtcagtatttttttgttttagccattctgacacgtgcatagtgataattcatttggtttcacactgtatttccctagtggttaatgaatgatgttgaacatcttttcatgtgcttatttgccatctgtatgtcttccatgaaaatttcttcatgccctttactcattttctcattggattgtttgttttttttactgttgagttttaagagctctttgtgtattctagctatgagtcctttgttggatatgtggtttccaaatatttctcctagtctttacctgccttttcatcttaacagggcctttcacagagcaaatgtttttaattttgatgaagtccaatttattactttttctatctgtgaatcatgttttggtgtcaagtctgagaactctctgcctagctctagatcctgaagattatctcctgttttctcctacaacttttatagttttacattaacacttacgtctgtgatccattttttccttaatttctggaggctgggaagtccaagttcaagaggcacatctggtgagggccttcttgcttggtgaagattcagcagagtcccaaaacagtgcaggtcatctcatggcgaggagactcagagtgctaacatgctagctcagatctcttcctctttttataaagccaccagttctgctcccatgataaccaatcaatccattaatccaatgaatgagccctcatgatccaatcacctcttaaaggccccacctctcaatactgctacaatggggattaagtatccacaggattttttgaggggacgttcaaactatagcaggtagaatgattccttctactttattctcctttccaaaatgattttagctattccagttatttgtccatataatcttaaaataatcttgcctatatctacaaaaaacttgttggggttttaatggcaattgatgttaaatctgcatatcaatttgaggaggattcacatccccactatgttgagtattccaattcatgaacatagtatgtctcttcatttattagttcttctttcatttctttcgccagcgttttgtagttttcagcaaacgagctctataatgttttggtagatttgagcctaaatatttatttttagattttgagcaattataaatggaattgtacttttaattttgatgttcacatgttcattgctgttatatagaaattcagttaatttttataggtttatcttacatcctgtgaccttgctgcactcactattagttctaggtttttggttttgtttttttcttatgattccttgtgattttccacctggacaacaatctcatccttttttctttcccatctgtatgccttttatttctttttcttgccttattgcaaaggatagaacatctagcactatgttacctgtgagagagtagaccttcttgccttattgctgatcataggtggaaaacattcagtctttcactctttttttttttttttttttttttttgagactgagtcttgctttgctgcctaaactggagtgcagtggtgcgatctcagctcactgcaacctgcactttctgggttcaagcagttctcctgcctcagcccccaaagtagctgcgattaacaggcatgtgccaccatgcccagctaatttttgtacttttagtagagatggggtttcaccatgttggccaggctgttctcaaagtcctgaccttgtgatccacctgccttggcctcccaaagtgctgggattacaggcttgagccaccgtgcctggccccagtctttcactcttaagtataatattagctgaaggtgttttggtaggtactgtttatcaagttgagggagttcctttccattcctgtttttctgagagtttttatcatgaataggtatggaattttgtcagatgcctttcctgtatcaattaatatgatcatgtgattttttttttcctttaaagcttgttaacatggtggattaaatagattggtttttgaatattaaaccagccttgcatccctggaataaatttcacttggtcatggtatataattctttttatttattgctgaattctctttgataacagattgttaagaattttttttggctgttacagatgtctgaaaaagaaagaaaaaaatgttgtgtttgtatttatgagggatattgatctgtagttttctttttgtatactgtctgtctggcttggtaatactagattcataaaatgaattggaaagtgttccatcctcttctgttttctggaagagacagtgtagaattagtattaattattttttagatgtttagatgtggaagtctgggatccttactctggctttgttggcatgggtgggtgtggggccacagtattttatgtggcatttggctggggtagagcaattattgtctaaacatcttccctcttgctaggctgccccctgactagagaaagcaggcttctgttgtttttgtttgtttgtttctttggtttttggtttgtgtttactgctgtttctgggttgctgatttctttagcttcaagtctgggatatatgaggcagaaagaaaaccacagaactcaccaccatgttgttccctgggtcatgagatccctagctggtcagacggattatttcacctttcagagtcttctggtgtttgtttggtataatttccagtttttttagttgtacttactgggaagattagggaaaagtatatttactccatattcctggaagtggaagtactggcttgctttaattttatgttaattcagagttagccagagaatctgtttatttctaagcctgtcataaatctttccaaaacatttatgtttcagccttaatattatatatataggcaggaagtatgctattgtgtgcttgtaaaatacttgctagttactccttaaagtatggaagactcaaaatgctgcggagccatctttctcaattttcgtagtccagatttatagtattaaaaggctgtttgcaggagggattatgcaaatcaggaagaggagatgtggctggagatgaggattgtggctggtgagcagtattgaaaggtggagaccactgaagaagagaagagtccatgagatgtctccaggaaggggagatgagactggaaggaaggatctgttctggttcttgaagtaggcagacatccagggaatctgtcagctcacttctgtcattcattcattcatgtctttgtaaagtattgttttgttttaatagtgcaagtattatactgtataaatacactctcactgtaaaagattcaagcaataaagcactgtcaccttccctttcccagaggtaattatcgttaacagtttggtctgtatccctccaatccttttcccacaaatctgcaaatacctatttatagagagaggccctatagcttgatggtgaccttggttaagttactttacctcttagtgcctcagttgtcttgtctcaaaagtgaggattaatagcaggactttcctcatagaattgtgttgaggattaaattagctaatgtttgtaatgtatttaacagtgactggcagtagcgtgagtgttgtggctgttaccttagtgttattattatgtattcttatgcagtacatagtgtgccttgacttttctttttcccttaacattatatgtaagaagtctctccatgtcatgacatgtcactcagcctctattcttctactggtatgtttccctactgtagaataacttagtaaccactgtgctgctgataaaaatttagatttttctttttggtctgtgaaaagcaatgctgatgatgagtattcccattcatacatctctgggtgtgtgctggtggatcaaaggatgtgtacattttaaatttcagtaattactataccaggtagcttttcaaaaatacttcaccaatttatatatactcctagtaaacagtatatccaaatagctatttacccttgtccataccattaccctttattgtcagtctttttattacttttcaaaactaggagctcattttgcgaatgtgcagttctgtgattagcaataaggctgagcatcttttcatgtttcttggccttttgcatttgactgtcagtttccagtttttgtagctggctcatatggctggctttctcttcctggtttctaggcttcccttatatattctgtgtattggttctttgcctgttatatatgttacagatatttttctctcggactgtcaatctttcagtcttgttcatagtatcacattttgttgatatgtttgttcctcttatcaaagttttgtttcgtttttatgtaatcatatctgtcaatctttttctttctttctttatgattgttatgatttgtttggtcttaattctttaaaagacctgtctagatgctaaaactaggaggtgatatttttatgagaaacagtgtatttacagagtctcagagtatcttccacaaaatagttgttaattacaaaggaataaaagtggggaaacccagcagataccactgtaagcgagtgatccaagttaacattaccagtaatgagacaattagatgtcatgtgcctgctgatatgctacactgagaaggacacagcatgtaaatgaccacatggatatgaaaacacatatatacacacatgcgtgggaatgcaatgtatacatatataaatacagagaaagaaggggaagcaaacatagtaatgttaacattttagggaatctggggacagggtatataggaattatttgcattatttttgtagccgatcttgaaatatgaaattatttttacataaaaacttaaaaaaattagaaacaaaaaagcctgactacctcaggataatagaaatatcatcgattttcagctaatataccgtctattttattgatttggctttttaaacatcagatttttattttggagtggagtataaagtggagtctaacttatttttttccaattgtgtagctattttctgaacactgtcttctccctgtggttttgatgagctgcatttgtcatatgctagaggtctttgcatatgcacagatttatgctgattagaacgctcgtttcctatcccacagatgaaacccacggcagcttctttttccttaatatagggcccttatgcagggaatacaggacataggggaaaaagaaataaactttattaccacctccttctgacccctgatgaccccaagccagactccagctagcaggtgaggggctgatcctggaagccccatcctaggggtctgcggaaatgctgggtgggctttgcccttcaggctgggatgtgaggcccacgtgcatagaggttgtagtagatacaacagcagctacactgcagcaggcccagggccaggggcataaacaatactcaggttaggtcaagtcataccactaacagcaaatcatgcccttaacgttcaacgctacttttctgcttaaatttaaagtactgcattatgagggcgttgcaacatcttgcttataacttaaggcctgctggcttcaaatgatttaggaagcagcctgctgaccacaggaagaaatcttgttgtcgggtggcatttgcttgggccccaaagagagggattttccagaatgtttttaggccgcattctctttaattaatcaatttaacctattcttctacaatagcccactgtttcagtgattgcaggtttatagcatcgtttttgaagttagcaaattgttgattttctaaaaactgaggtaaagtaacataaaattaaccattttaaagtgaacaatttagtggcatttagtacatttataatgttgaacaaccaccacctctatctagttccaaaacatttttatcaccccaaaaggaaatcctgtacccattaaaagttgctcctcattctcccttcgctgccttcctctggcaaccaccaatctgtgttctgttgctatgggtttgcctattctggatattccatataaatggaatcatataagatgtgaccttttttgtttggcttctttcacttagagtcatgttttcaaggtttttagaatatgttttaatgtctgctagaactatttccttccttctcctctttttcaaaattgttttggttactaccacatgttattttttctaaaagaactttagattcaactcgtcaaattgcacaaaatactatgttttgatcctcagtgcaattgcagtgggtaataagttgatttgaagggattcgacatatttgcaatactgagttttcctatctgggagcatgatttgggtacttaggtcttgttttggtacttcttagttaagttttaaagtatcccacagatgttttgtcatttctgttattgtacgtacgtgtttggtttctgttgcgcatggatttttttgatagctttataattgacatacaatagactgcatatatttagagtgtatgatttgatgagttttggagtatgtatgtaaatgtctgggacaccatcatcacagttaagataatgaacatgttcatcacccctaaaaggttcctcctacccttttacaatgcatccctgatttagtttgggtattttgtcaccctgtatctcatgttgaaatgtaatcccccgtggtagaagtagggcctggtgggaggtgattggatcacgagggcggatttctcatggtttagcattccctttgggtgctgtccttgagagagagagttctcgagagacctgatcatttaaaactgtgtggcacctgccttcattctctcactgctgctcctgctctggccatgtcacatgcctgctcccacttcaccttcctccatgagtaaaagctccctaaggccccccagaagccaagcagatgccggtgccatgcttgtataggctgtagaaccatgagccaattaaacctcttgtctttataaattacctagtttcaggtattccctgagactagcaatgcaagaatggcctaatacaagccatcactcccccaaccccacttctaggaaaccgttggtctacttactttctgtcactgtagtctaggttgcattttctagaactttatgtaaattctttattttgtctggcttttttcctctcagaataatgatcttgagattcattcatattgttgagtgtgtccttgtttgtttgtttaatgagtagtgctctgttgtacacctgtatgacagtttacctgttgagggttatttggcttgtttccagtttgggctattaaagtaaagctgctgtgaacatgcatatgcaagtctgtgtgtggacatacacattcatttcctatggataaatacctaggagtggaagggttggattgcacagtagatgcatgtttaactttaaaagaaactgccaaattattttccaagtggttgtatcattttatatcccagcagccgagcatctgagtctcagttcttccacatccttgccaacacttgagatagtcattcttttaatcttaaccattctagtggatgtgtatttgtttatgattttagtttgcatttctctaacaagtaatgattttgagcttttttttttttgccattagtataacttctttggtgaagcatctgttcaaattttttacctgcttttcactgggttatttgtcttattcagttgaaagggttctttgtatattttaagtacaattcctttgttggatatgtatgaactattttctcccagtctgtagcttgccttttcattttcttaacagtatttttgaaaagcaaaagttttaaaatttgatgaagtctagtttattttttttcttttatagttagtgctttttgtgttacatttactaaatctttgctagccctaaggtcaagatttttccttctaatcccttctggaagttttatggttttagttgttatatttagatcaatgatgtatttcaagttaatggttatatgtgatatgatatatggatcaaatatcattttttatatatagctgtccaattgttctagtaccctttctttaaaaatcatctgttcttcattgaattactttggcacttatgtcaaaaatcaactgatcgtagatgtataggcacattgctagactctgttttattccattgatctataagtctgcctgtatgccaaacccatactctttgattactgtagctttgtaataattcttaacaccaggtagtcttttaactttattctttttcaaagttattttggtcgttctaggtccttcaaattttaatacaaatttaagaataagcatgtcaatttttacaaaaaaaaaaagccttctgggattttgattggagttgtattaaatgtgtgggtcaattcgcaggtagttgacatcttaacaatattaagtcttcagatccatggatgtggtacatctcttcatttatgtaagtcctctttaatttctctcagcagtcttttagttttagtgtaaagtctgcagatcttttgtctaatctttcaggcatttcatattgttgatgctattgtaaatggtatttatttttactttaactccattcttgttgatagaaatacaattgatttttgtagattgacttggtattctgcaatcttgttaaactcacttattagttcttataacgtttttgaatatttcttacaacttcctatgtagataattatgttgtgtgtgaataaaaacaattttacttcttcctttccagtctgtatgcctcttatttctttttgttgcctccctgaactggctagagcatccagtacactattgagtagaagtagtgaaatcaagcattcttgccttttcccacatcttagggggaaagcattcggtgtttcaccatttaaatatggcatttgctgtggattttgaaatagatactatttaacagaaagtacccttccagagggtttttaaatcatacatggatatcgaatttcatcacatgctttatctgcttttattgaaattatcatatggattttctctttttaattttaattttttttttttttatggagacagggtctcactctgttgcccaggctggtatccagtctcagcttcccagagtgctaggattacagatgtgagccaccatgcccagcctgggttttctcttttaatcatttaatataatgaaatacactgattgatttttgagtgttaaaccaaacttccatttctggaataaatcccccatggacataataaattgtccttttaatatattgttagattcaattttctaaaattttgttaagaaattttatgtgtatgttcgtaaggaatatggattggtctgtggttttcttataatatctggttttagtattagggtaatactggtctcatatactgagttgagaagtgttcctttcttgcctgttttctgaaatatttaatgtatatttggtattatttattctgtaaatatttgcagattttaccagtgaggctctctgggcctggatgtgggaaggtttttaaacaacagttcaattttttaaatagatgtagtgtcattcaggttatctattcttaaatgagccttggtagtttgtgtctgctaaggaatttttcatttaatttaatttttctaattcctgggcataaagctgttcaaaatatttccttgttatccttttaatgcttctaagatctggagaatgtactctcttttattcccaataatggtaattggtgtcatctctctttttttcttgctcaggctgccatcctggatcaaatagtagttctttttttagttctttccattttatttttggttatagtcttagttttatcaatttaatcaatcttctcaaagaaccagcttttggttttattgactttttctattcttgtttttaactttattgtgttcactttttaaaattttttcttctgcttactttgggttaaatgttctattgtttaaggtggaagttttggtcattgatttgagacctttcttcttttctaacataagcatttaatgctatgaatttccctccaaactctgaattagctgcatccctcaaattttgttgtgttgtatataattttaattccattcacaatgctatctaatttctcttctgacatcttttttgacccataaattatttagatgtgtggttttttgtttccatgtatttggggacttctagatatgtttctgttactaagaatatattccgtgtggtcagagaacatagttttatggcttacaatatgagtcagcaaacttttctgtagagggccagataatgtatattttaagctttgtgagctatatgatctccattgtatattattatgttttcaactcttgaaaaaatataaaactatctgtaatttataatctgtacacaaacaggctacaggctggatttggcctgcaagctgtgattcattgacttcagcctagagtgtgatccgtcctagtgaatgttccacatacacttgaaaagaatgtatattcttcttctgttgcagttgagtgtcctacagatgtcaattaggtcaagttggttgatagtattgttcaagttttctatattattcctgattttctgtcaatttgttctatcaattattaagagaagggtattaaaatctctgactataattgtggatgagtctattttttctcagtgctataagtttttgtttcctgtattttggtgttcagccattagttgcataaacattaaggaatgatatgtcctcgtgattaattgaccccttcatcattattaagtgaccctctttatccctgttaatattcctttctctgaaatctactttgtcatatattagtatagccactacagctttcttttgatttgtgttggcatgaaatattcttttccatccttttgctttgaacctatctgtgtctttatatttgaagtgggtttcttgtagacaccgtattatctagtctgacaatttcttccatttaattgtggtgtttagccatttacatttaacatgattattgatgtggttgggtttaaatgtaccaatcttgctttttgtttaattaattttttcccatctgttgttttttccccttttcctatttttccaacattttttattaattatttttatctcattttatttcctctgttggcttaccagttctatttctttttgttgttgttgtttctcagtagttgcttttgagtctataccatgtatctttagcttatcacagtctacttttaagtaatacacaacttcatgtgtagtgtaagaacaggatgtttattgttcctcttctagcccttgtgctattgttggcatacattttttttctacgtatgtcataaactccacaatacattgttatcatttttgctttaaagttttattatcttataaaagacttaaaaataataacatagtcttttatagttatccctatggtactatttctagtgctcttcattgttttgtgtagatctgcatttgtgtagatctgcatctgatataattttccttcagcctgaggaacttttttgaacatttctcatagtgttggtttgttggtgatatattctctcagcttttgtttgtctgaacaaagtctttattttgtctttgtatttgaaggatgttttccttgggtatagaaatctaagttggcattttctttcagtactttaaagatgttgcgacaaatacaaaaaattagctgggtgtgatggtgcacacctgtaatcccagcagctcaggaggttcaggtgggagaatcacccgagcccgggaagtcaaggctgcagtgagctgtgattgcgttactgcactccagcctgagcaacagagtgaaactctggaaaaaaaaaaaaaaaaaaaaagatgttgctccattatcttatggcttgcattgtttcttataagaagtctgctgtcattcttacatttgtttctctgtacatagagggtttcaggctgtctttaagattttctctttatcactggttttaagcattttgattatgatataccttggtgtagttttcttaatgtttattctgctcaaggctcattgatcttcttgaatttgtgggtttacagttttcatcaaatttgtaatatttctgtttattattaaagtatttcttgttcagttctccctttctgggactccagtgacatgtatattgaaccactagatattgtcccacagcttaaatagctagaaaaacacatggaaggaaataacaaagatataatcagaaattaaaagtaagagaaaaggagggagagatgttaattaagaattgagtctttgtaaaaagcataatagataaacttctggcaaatctaatagtaaaataaaataatataaagataaggaaaatttatttgggaaaaggaaagtaagaatataggaaatttcaaaattataaaagaagatgatgtgtagctcttatgtactgccatgtgtgactgaaattgaaaatcctgatgagttagataatttctactgctatctaagaacaaatcctaaaaagcctgtatccaaggaagaaattggaaatgttgttagagaattatttacaacaaaagcactaggcccaaattgctttaaagtaacattctctcaaattaccaaggaacagttaatttttacatcgtacaaactatcctaaagctttgaaaaaagattggacgcttcttcatttgttttacagagctaatttaccaaggtcagttttacaattgaccttgctaatgtaaatggtactgtttcccccacctcattttattttttaaaatggttattggtgtggtttacatgttttgcataaaggaaaattaatttttggccaggcgtggtggctcacacttgtaatcccagcactttgggaagccgaggcgggggtatcacctgaggtcaggagttcgagaccagcctggtcaacatggtgaaaccccgtctctactaaaaatacaaacattagctgggtgtagtggcgggcgcctgtaatcccagctactcaggaggctgaggcaggagagttgctttaacctgggaggtggaggttgcagtgagccgagattacaccattgcactctagcctgggtgacagagtgagactccgtctcaaaaaaaaaaagaaaattaaagttttaaaaatagatttctcttacattcaacaacctcattgaattcttgtttctaattccctcccttgcttcctggctgttccatgaccctttagattatggtttaggatgacaaatttatgaggtatgtatatgatgggaaattatgtgattacaaactaccgtgtgtgtagggagtggcaggtgattggagaagaatgtaagaagtgatcgacctgtggactaagcaaatacacgttgactccgttctccacgctcctttcttaaggcctattggattgtcttctaatgcatttccctaactccattctaaccttctccagtcttccctgaactgttgccagtggaaactttccaaaagatgaggttactcacctgcttagaattgtcctctggctctctgtttttagacttacaggcaaattcgttgttttacttaccaccaagcgctgagcacctagcactcagtaagtgtttatgtaatgaatggacttcactggcatctgagagttgtttagatttgctccttccctaattttcatgttctcattctgcccccactcacagttcctcagaggtgctgtgcccatccttgcctctgtgcttttgtgcatgcccaccattcctctccctgtggaattatgttctggttctgtgtgtttcaatggcacccttttcctccattgcagtgcttaccactctttaattacagtttaattacagttaccactctttaattacttctctgtgtactgagccccatgaggaggaggccacagagctatgcctttcgcatagctgtacccccagtacccagcacagggcctggtgcacacattctccaccagcacacacaggatgtttattgaattgaattagctggctcctttctgtttggccttcttgtgtctgggatattggatgccaacatccagctaagttatgtttgtgttaaacatgaattgaaatgcaattacagctggcaatgtgctttgagagctgagtaatagagtacataagaagagtgacttaggcacgaggaccagtttatctcctttcctttcttgcctcctgtcatcgggcatgactcatgaacggcgcgagttcaacttgtcttctcttaaatcccatcacttcaactcttcctgccctccttgtcttgatgggtctctttcagggcccctttgttaaaaccagcaagaagcccagagccaggccttgcagtctgagttggttggagccagaggaggctgcactccccactccagggcagaggtggggccagcaccatgggtaggagtgtgcacggggctgctgaaatgctggctggatcactagttttcactactaatcacatcctgctagtgccctagctaaggcaaacatggtgtcttttatcaaagatgttgccactttaccttagacccattgctttcatagccttctcgaattgcattcaggaattgtgtcttaggtttggacccaccttgaggttaattgatttggcttgatagaaaaactcctcccttcttgttcttttgtttgtttgtttgttttgttttgagatggagtcttgctctgttgcccaggctggagtgcagtggcgcaatctccactcactgcaagctccgcctcccgggttcacgccattctcctgcctcagcctcccaagtagctgggaatacaggtgcccgccaccaggcctggctaattttttgtattttttagtagagacggggtttcaccgcgttagccaggatggtctctatctcctgacctcatgatccacctgcctcggcctcccaaagtgctgggattacaggcgtgagccaccgcgcctggcctgttttttgggattttttttgagagggagtcttgctctgtcacccaggctggagtgcagtggtgcaatcttggctcactgcaacctccgcctcccaggttcaagtgattctcctgcctcagcctcctgagtagctgggactacaggtgcctgccaccacacccagctaattttttttttttttttttgtatttttaatagagacggggtttcaccgtgttagccagaatggtctcgatctcctgacctcatgatctatccacctcggcctcccaaagtgtctttttttttttttttttaagagacagagtctcgctctgttgcccaggctggagtgcaatggtgcaatcttagctcactgcaaccttcgtctcccaggttcaagtgattctcctgtctcagcctcccgagtagctgggattacgggcatccaccatcgtgcccagataatttttgtattttttgtatttttgtagagacagggtttcaccatgttggccaggctggtctcaaactcctgacctcagatgatccgcctgccttggcctcccaaagtgctaggattacaggcatgaaacactgcacccggcctccagaatctttcagaccatgcagttgcttattaatatacctttctattgtttctctaaatcagctggcatgctcattttataaatccactttcctgggtccaaagggagatttcatcaaactttagagatggagcagaggaagagggaagtttttatttattagcagttatttattaagcccccaccacgggcctgtactgggtactgcaaactgagtggtgaatggtcagatgtagcacttgcctgcatggaatttacagacccagactgaaggattaaaatgaaaacaggggtagcagagattggagcaccctccagtggccctcttccttcccaagattaatcccagtaggtgagttctcatttccacatcttcctgcctggcttttgcttggaattccctccctcattgtgctgtcaatctcttcccctcctctgtgtcttcctttccacaaagacatgcctctgtcccctctgttcttagcagatgcggcctccgccaccctcccttcatctcaccagctcctccagccaccatctttgtatgccctactccccaaaatcgtccctgcttgccatctcctcttcattatccccactcacccctcaattcctaaattgtctaactcagtggctctttcctaatccgtattcttctcaacctcatctctactttggttactgttgaccaatttcctcctgccttaatatattcattttctgaatgcagaactagtacatgttcattatggactatgtagaagatgttaaaaagcacaaggaagaaaataaaagcgacctgtaatcctacaactcaggaaaactattgtccacactttaactgtgtttagtttgtatgtgtgtgtgttttagcagtaatgggattctatttatataaattttataacgtgcttattattgcatcatattttcttattgtatttttgcagtattttcttagatcatcggatattcttctatagtccttctttcctaaaatgctgcattccttccatttgatttcagctgcattcagctttgttcctctctgaccccccttcttgtagtagcctctccctcactgtgcaccctgcccagttcccacccagcctcctgcactgagcattcttctctcacttggcgtctggccctgccaggcgccgagcttctgactccacgcagccagcctgtgctctccgtagcacggggcctccatttccaccaggctgctggacaagcccacaaatcgtgaccggctgacacctcaacctgaatattcccaaaccgaactcctcttctgtttccttaccactcccaatagaagacccaacctacaaccacccttcttctgaatgttcccacgagacagaggccagaatccttccaaggcttctctgctagccctacctgccagcaccccatcaggcatttcttcatcttttcatcctcctcttctgtctctgctaccagctggataaggtcctcacaagtcttgacgcgggtagtttcttctaagcagtctctggtgcctcccatctcgactccaggtttctcctataagcgccactctgagaatttctcctccctgcccggggctctccagccacgctccccctcttgctccctaggatggggcaggtcctaagacagcacctgccctgcagcctcccaggttccagctcctcccaccagatctctgtggtcgtatggtctgctctctctctctcatccgcgtggccagtggtccagccaaccccacgcttcccacatgtgccggggaggacccacaccctggccttttctgtcctttcttctaggggtgcgcctgcccctctgcccctacttcgtttctgcctgccagcactttatgatgcatcccacctgaagatgcctttggttctgtttatcctcccagcagcctgcctcttctccttctgccttatgcttgcttttgagagctctcagcacttggcgctcccttacagcacggaggtgattctgtcttacacttctgatgacaccaaatatccatactgtgtctgcccctgcactagttgcttccacacacagtatttatttcacacaataaccctgccaagttactattgcagtcttgttttacaagtaagaaagcaaagcctctgagagctcaagggtgtggctgagtggaggtcaaacccaggtctcctgcctctgtgtggctctcttccctgcgccctcactcctgattcagctcacctgggagccatcctcggagggaggggagggagtgcctgacatatcataaatggctagagaatgtttgctgaaagaaaaggaaagacttgtgtcctgaagagatgaattgcagcttagtgatgatggcacatgctggggagggctctatttgatgccaggcccgcctgcatatctaggtgcggaagggaagcagtggtttccgatgcaacgccgatacttggcattgattaagtgattactttgtactgaccaaagcactttctttggtgctgtaactacaactgtatgagctaggacctactgtttccatttatagagacaaaagccgaggctcagagaggttaagtaacacagccaaggccacacagccactactggtttgtgaatccaggatttgaatcacatctgtctagtatcaaggcccatgttttaaactctgtatgctgctggcctgcgaggctggtattgggtgatgtggagcaaacattgttatcccagattccagccaggaaggggctttggagcctgccctgctttgctttttcttccttctctgctcagcagatgcaccctccataatgaaatcaccttgaactccttggataccgtggtagagagagggttggagaaccttgtctttaaaattttttaaaaaaaatcacatgacatttaaaaaattatcaaagctcatctcagaaaatctaaatcatgtagaattctatcaaccaaagagtgaaaatattacctttcttttttcctctaatgccaatacatctcgttgacagtttgcaagtatctttctagacttatgtttttctttttaccaaaaaagtatttatttttaattaaataaggaatagaagaatatcttttatctaaaaaaattaaataataacagccaaggcttaagtacctttcaaccacaccagtttgctcatttttcttcctgacttttttctctgcatttatatgtaaatgacttacagaaatacatcgttgtaatttgtgtttttaatataaattagatcatgccatcagctcatgctttatttttatgaagatgtacatatgtcatgtagatctttctagactcgcgtgtgtagaccctccacactcttgttaacgggtgtgtgatgctccgtggttgagtgagggccacaggagccttctgctgctcagcctgtagttcttttaccttcagtttttcactgaacaaagcttttagtgcatgcttccttgttaacgttgttggatttagcaaataaaaatacaggatgaacattttgaaaaaatttttaattaagaaaggtatttgttgtttgtcagaaatttaaatttcactgggtgtcctgtattgtctgtagcaactccattccttatgcacatttgtgagatttgaaataaaaagtttcttcttcaggtctattgtctgatttttaaaattaaaaagttatgttacaaaatattccaaatatatagaaaagtatagggaacaatgtagcaaatgtctatgtatccaccatgcagctcttccaggtcttgatgtttcaccaaatttctgtcagatttcttttttaataaaagaaagaaaacattattgatgcccatgcaacccccaggcccatgcctccctcctttccagagtctctactgctctgagtttggtgtttttcattcctaggtatctttccatgttttcacactttatataggtgatatcctacatgggatatacgtcacacttatatgtatttttcacgtgggtttttttttgtttgtttttttgttttttggcagattttcactcttgttgcccaggctagagtgcaatagcgcaatctcagctcactgcaacctccgccttccaggttcaaatgattcttctgcctcagcctcccgagtagctgggattataggcatgtgccaccacacccagctaattttgtatttttagtagagacggggtttcttcatgttggtcaggctggtctcgaactcctgacctcaggtgatccacccacctgggcctcccaaagtgctgggattacaggtgtgagccaccatgcccagccagcatgtttttttttcttagcattgttcttgagatatttttccttgctgatacagctctagttcatgtattttcaaggggtatagaattatattccatgaatatactataacttagttattcattcttctgttggtgaggatttgggtcattttcaataatgcaatactgtaaacaatgttgtaaataatatccttttgtctttatgctaaggatttctctagggaacaagttaggaatagaattgccggtcattttcgcctttctggatatggacatgtgccctctgaagtggcgtgcaggttcaggtttgtactccactcattttgttggacatttgcagtttggtcagtgatttgctgtgaatggtctagcactgccattttgcttgtgggtgatgtctttttcttattgcttgggaggggctcttttttttttttttttttccccagacagagtctcgttctgttgcctaggctggagtgcagtggcgccatctcagctcattgcagcctctgcctctgggttcaagtgattctcctgcctcagcctcccgagtagctgggattgcaggcgcccaccaccatgcccagctaatttttgcatttttagtagagactgggtttcaccgtgttggccaggctggtcttgaactcctgacctgaagtgatccacccacctcgacctcccaaagtactgggattgcaggtgtgagtcaccgcgcctggcctggaggggttttttatttccttattttggatgttaatctattgtcactgtgcactgctcccagtctaaggcttatctttttactttgtgtcttgtgtcttacaaaggatccctttgggatccctagggatactacaaagtatccaagttttcaattttagggtagtaagattcatcagcctattcttttatagatggttttgtacatgtccatctatttctttaataattctctctatttaaacataaatatactccacatttttttctaaaagtttggaagttttgcttttcacatttcatctttaatccatcaagaatttgtttttgacaaattgaggtagggctcaacttagtttttcctctgtagtgacgatcaggtgtctgggtactattgattgactagtccctacttcagccactgatgcgtcactggcagtgccgtggtagaccaggtatcctgtggctgagaggagccggccttcccctgggtgccgaccagccgcaaggcaacctctaggctgctgatgctgctctctgcaggcttgtggaggtccagggccgtgtcatagcttggccgtctgggtgcgacagaaacgggagcacttctggcccagagcctccttcctgatgacttggaacagggaggacgtacctgctgcgatgcggccaggtgccctgcctatgtgtatctcccatttcctgtctcgtgggccccccacggaactgtcttccctgcctggctcccttcggccatcaggaggtgcagagccagggctcctaatcccttcacctctacaagggcttttgctgggaatagggacctgctttctgcctccctgcccaacctcaggaagccatcccctctgtgcctggcatggctaaggcacctgtgccacaggtagaatgaggaaagggctatcttgtgtagtcctagatgcaccaggctttagtctttgtgtgtttttcctaccatgcattcttttcatggttcaatggttcaatcagctgtttggcaaatatctgattgtgtactgtaaacaaggcatggggctaggtactcagaaaaatattccgtgaataagataagatctttactttaaggaccagagataatagtaagtaggtaacatttttttagtgtcaccatgtgccaggccttatgctaagtacttctagaaatactaacagctttattgagatataattcatataccacaaagttcactttttaagagtgtacaatccattggtttttagtatagccacagatttgcacaactatcactgccacctaattttgaacattgtcatcacctgctaaagaacgctccactcattagccattctctccatcaactcttcctgccccccagtccctggcagcaccaatccactttctgtctctagggatttcccatttctagacttttcatgtaaacaaaataatgtaatatgtggtcttttgtgtctatcttattttatttagcaaactgttttcagggttcttctaagttgcattatgtatcagtataccattccttttatgaccgaatactatttcattgtatggctatgccacatttttatcagttgatgaatgtttggattagttcctcatttggtaattaagaaaacatgctgtcatgaacattcacatgcaagtttgtatgtagacgcttgttttcatttctcttgggtatatacctaggagtagaattgctgggtcatatgctaactctatgtctaacattttgaggaacttccagactgttttccaaagtggctgcaccctgttacaatcccaccagaagtgcagagggctcgcattcgtccacatccttgccaacatttggattgcctgtccttttaattgtcctgtccttttaactaccatagtggttctgaagtggtatctcattgtggttaagtgccttttgtgctttctctcatttaatccttacaaataatcctatgaggtaggtattatttctattgtcatttttaggtgaggctcagagagtaaaagagtgactttggaaaaccctagtatgtaaatggcagagctgggacttgaactcgaatctacccaacttcagaaatccaagttcttgcctgctgggatcatcacagaggctgtagagtgggggattctttcagccaggccctaaataatgagatcatttcaacaagacagatgcgagagggagcaacacgagcaaaggcagggaggcaggaaatggcggggcacagttaggaaagacctgtctgagaaggagaactagagtggaaagcgggtacagtactagggttagacatagaggcccagaggggtgcaaggccaacagggctgggtggtccactgtgtccctgtgccccgtgagtggaaaggaccacctgaagactgaggcagatgcatttgtctcagggaacaggtttatgtttttcatttcttttgctaaaaaaaagagacatttcagctaaaggtataagaaaatgatgcaaataaaatcagaactgaaaaactgagagttcctgacctcttcactggattagtcaaatgcctcttcctttcactttatatttgtagaaagcatcttgagcacaccacctgttagggagtccacggatggttggataggctccttgcctctgctgtgcccacgctgctcttattgagtttaagtggctcacagttgcccgctgtctggcctgggccaagtgtgtgtgtttccactgctgatgatctaacatacccagaggcctatgaacttcattcttgttcatcgtgtcagccagatatttcctttggaatgtctgcaggatttcctggcccctttcattgctttctgtctgctgaatacacctttgaattgtgggtgggctctcttgaaacaccggtgtgtaaacagattgatgaaattggtggttagcttgtcttttgagagtttctctttggcaaggagcactcaattccaacgttgaagaacctctgacggttgaaatgattgactgcgccgctcctctttaggtggcttagttggatagctgatttacaaagtgcttctcaagtttaaatccagcggatttttatttttcaccccatcaaatgaagtatttaccattatttttcttataaaagctatatatgctcattaccaaaaaagcagaaatacaggggaaaaaaaagaacattaaaaatactcataatctcaactgtgcagagccaaacagtggttaatgctttgctttatatttgcctagatccttttctatacagataattgttttgaaaacaaactaaagtattgtactttataaaccatgttgtaacttactctttctcctgaactttccgtgttagtgtgtgtatgtgtacaaagttgtttcaaatggctgttgagtcttctattgtgaggatgtcctctaatcattagaaatttatcatctcccactcttacctttataaactgagccccaataaacatgtcaataacgctcatcccatcttaccaggctccagttacagagccccactttctgtccctttaatatgacaactttatttctaccctagggtcttcacagtaactgtctcccaggcctccggcccccagatctttcagggattaagggagtcccttgaaccagggaggctgcttacatttaacctcagcggtctctttacagtgaacatgccttacaggccagcctcaggtagccagtcccactgtccagtgggctgttcagggcttcctgaacgcacatcatcctctgtgactgctgcacagtggcccagaatgtgacctctgaactcaagctagagaaagcaatcagagacctgggctatgtgagacaggggtgggggccaggtcccgaagggtttgtagagccttgtgtcgattctgtggcactggcagccaccatcccagggactgcctgggtgctgcagctccgtccccagccatctgcatgttcagttttggtggactgtagctgtggggaaggctggaatcagctggacttgcagctttggacattgtcacccacttgggaacacactaacaagctaactaggagtgagattatgttgcattgctagtcatgtccctgatggcagcaatagcggcagcttgcctaaaagaaataacgaattatcatactatcttccatgagatatttccccagctctctttcaaagttaaaatttgcttttactttaacaaagtgatgcctgcgtgcacagtttaaaaaatcagagtgctcataagaaaatatagcagcccctgccctgtctccccaccttcacctttttatttcctagaggcatttattttccactttttaagatttttttccctctagtactttatctccatatttctaagtaattttattatattgcttatttcttgattattttcttctcttataatctcctcccattaggcagtatcacaatttttggtggattaatgcttagtgtttacatagattacaatgcagacattgaataccactgaatcaagtaacatattaggagtgtgtgttctttctcatacaaccttttatttttttcttggaattaatcagacttgtttcattcatttgaggagttgtccgggtgcctattgattttcacagtacgttcttaaaatgtctttttaatttttaaattgattcttttttttttttttttttttttgtcaaatagccttaggtgcattgttttcattgttctaaatgctctaaggcagttgtcacatgcccatccctatttctttcgaacgagaaagtacagttctaaatgctctcccctccacatcccctcctccccagaggttgctgccctgacgtctcttcctttccctgtctgggcctgggcgtgctgctgtcctctggctgctgtgctgtgtgggttctgtttcctggagtttatggtttcccctttattgatttaatcctcggttctgctgatgcatcctccagtagcttcctcagaaagggcccctgggagataaactttttaagtccttgcacatcggcaaaggtctttattctaccctcacacttaatcgataatgggcttagatgtggaattccagagttcctcagaattttgaagacattgttatcttgtcttttagtttctaatgttgcagttaggaagtctgatgcaacatgattcccgtccctttgtatgtgacccgttatttttctctgcaagtgtttaaggtggtttctttatccccagtgtggtgggattctcggttctttcgttttggggtgggtctttttcatccacttttgtggaaacactcaggacctctttaacacagaggctccccctcccctccggtttttattttaaaagttctttctgaaactttttgttagctggatgttgtcttgacccttcagttttcattcctataattgatctcttcatctctgtactttaccttctggaagatttcctcagctttctcttccagtgtttacagtttctaatctctttatattgtcctcaaattgttcctttttaaaaacgttttcataatactctgttcttgtttggtatttgcagtctattcactcatccctctgaggatttaattacagactgggttctctgtcctgagccggcactgtttccccctattctctttgctaccttcaagctcccttttttctattttgggcccttctgtcatgtctgagcctgtccccagtgcctggtgaccctttgttgtgggttgggatttaagatggaggcaccagctcatgggctggagccctgtgggtggggggcctgctggctggtgtgctacacagtggggcgacgagcagggagctggctcagatcgtgggctggtccaccctggcgctttccagagacaaagccctcagtgtccagtgttcaggggaggcggctggaagcaagaaggagggtaagcgcgggtggcagggaggggcctgccattgccattcagtgtgtacgcttggttactcaattaccctcgtttccactctgaagttgcacctcctcccccacctcctcctgacctccagcctccttccccacctgccgggcttgtagagtcctgagctgtgctgggttcctttctgcagaagatacacctgaaactggggtgggcacctgggagtctaaccactttgtttatgaaccttgtttcagtctacccaattcagccctaaacttgcacttgctcccccgcccccaccccaatggtgtctggtgattctggatcctggggctctgctcagtatcggctgccacgggccccttaggtcacaacccgccccctcccccacacttgctaaatcccttgccctccgccttctgcagtgccaggcctttgtgctgcctctcccctcttgctcgtcattgtggaggcttctgcactgtccatttgattgttgttttagaagaatcctggcaggaagagagataaaccatgtgtacattccgccactgcctggccctagggccctcctgctcctcctcagagacagctcctactcctggggaagaaatgctaggagagaggttgtgagaatgtgtgagtgtgagtgtgcaagagcatgtgcatgtgtgcacatgtgcacatgtgtatgcgaggccctgtaacagactctgaaggttctgcagtcagcagacatatcgagttgtcttgggaacaaggcagcaaacacacaagagaaccaaaagagtaggtggcctcagtgctgaaatggatatgtgtctcagagtggtgattttgaaggggattcactcagctcaatggattaaatcctggaaatttcatttgaaaaacttcccgttaccttacttgggtagctgacagggtatgtggcttttcacactgccctgattgcagagttgactcgttcatttattctttcaacaaggtttgatggagcccatccgtgtcaggcattgtgcttggcacagggggtaaaatggcaagcagaacaggcactgccgttgtccttgtgaagcttatagtccagggtgggatagcagcgggagggcagatgttcctcgtacaagtatatcatttgtgtttggaaagaccagctttgttcccagagattggcacagagccccgggacaactgaggactttttgaatcctgatgtagcctgacatcactttccagacttggttcgctgtcagagcagatgtccccttttttggtttagaaacattcgcgctgtctttggagtgctcatgcactaaggcaggcactttgcatgttcgtgggctcctgtgccccggcagtgatgcccgcagggaaaggcagcatgtccactttgcagaggaggacaggactggtttaagctattgggcctcaaattcaagtctgcctctgaactccatgttgcgcatgctgcacgcaaagcatttggtcctccaccccacaccccacctccccccagcttcctgatgctgggacctgaggctgactgctgagtttgtaagtttctgcagtgccgccaggtgggcgtgggcactgtcaggtagaccctgccttgagtcagtggtggaggctcctcttgacactgtgacttcagccgcatagatagatcatttatcttgcagatcattagctctcctgacttgggatgggaagaatttaggttattaggcacctttatgtgactgggttgggaagacacctctgggtacatcttgttgctgtaggaaagacaggccagaaatgccccccttgttccaccagggctgcctttccagtgctctcaaagagccaggaacccacatctcactcctcacccagtacctggtcctgtgggtccctgaaccatccagccctccaggaccattccagagcccttctctgcccagcactgccttccttggaggttaggggagtctctctctctctctttctctctctctcttctctgtctctctctctctctctctctctttctttcttcccacctcacctccctgggcccttcatgatgcctttacacacttccacgtcattgcaaatgagtttgggcccaggtcaaagctgggtctttggtcatccttttttaatgcttcgcagacaaggactgggaggctctaactgcccaaacagtgaagcgtgggctcaaacagaggggctcacgttgccggcttctcccattacattttcatttctcactctgaaaaaggacagttctagcagtgtggtgggtggagagaaccatcattggcaagccctggagacctttctagccttgggttagaatgcacagcacccctctgtggcacttccagatatccaaacaagcccttctagacgcccttgtctcttggaacgttaaagacacagctccctgtcttccaaggcagcttgtggttccacagccttggagcgtcctgcagacagtttctgtttttgaaagtttttcagaaattatgcatttattatagagagaccatgtaggttccctcattccctttgtttagagcatcttttatttttacattttagtgattctgaaattgggatgcatcttaaaatagatgcatgtgtttggatatggtgctgtgcctttttcgtgtgaaggggtgttccccaaatgactgcatcctagaattgaggaaatacagtaaaattgcattgggagacaaaaatctttcaaaacatgtaatccatgggagaaaacaagcatagggggtgctttgtgtggaggagctgagaccactgccttaaatctcatgtttccctagaaactctatgtgtgaccattatggggaaagatgctgacaaggcctgacccccattcgatcgtgtttctatctgtgggggtgacatacttggagcaaacagttcctaaaattatccccataccattcctccttcagctttcaggtcaaatatatttgcatctttatcataagggcctttcttttcctgttgttatatttgctaatttacaattgtttggtttgaaaaacaaggattttttcttttgcctcctggccttttggtttttctgaggcagcctcagagagcgtggccgtggtgggctccaggaatgtcctggggagcctgagcccactgggctggggtcctggctcccgcctccgccctgagcctgtgacaggcagaggccatccatgtgctgtggggcctgccatgctctgtgcagagcctgcagtcagtgtgcgggatggggctgaatcagggcacttttgtgtgaagaatggaggcacttccagccatttgtcaggatgggcgggagcttgtcaggtcaaggactggatcccaaagtctgaagctcaaaaggacaacccagaaggagtcagaaagtgaactgctcagagacctcctgcagagtttatcccaaaacaggcactgctcctcagtcttcctggatgtcccccttcgcggtgcttaaaggaaggtgtgcaaggttgattcatgctctcagagggaggctgagtcagaaaacagaccaagccctgaccagcgattcacagagcagtctggaaagaaataggaagaaagcaccgccctctcctagccttcttctcctcctcctctcccatctcctttgcactctctcccacaaagcctggtctttcatgggaatatcccccagcccagccccagtctaggtcacaggggctttgatactcagatcaaggctggctggcgtcattctcagactcttcctagtgagaatttctacagctgcagatgagaaaatggcttcttagtgagactagaaacaaggaaccgagtgagtcttcttttgtttttctatcctgatccagtttctcaccttgaaccccactgtcagggcttgtaccaagaggacgcagggtggagtgaaatgtttctgacctccctccctgccccagcctccagtagaatcccgttgactgaagcacccagctggtcctggggccctagagcaggaggctgtgtcaccctcgccgcaggcagcgccccctcaggtggctcatcacacccagtggactcctttcttcaccccgcaccatccccccgagtaagtggtaatagccgcttaatgtactgacttacccaatcccttcttggtccattacgacaaaagttgctcttttctcattagaaccatttttgtcagggtgtctttaatcaatggcttccccagggacagtatttttagaagttgtgtttttcacaccctcccttttggaaaatctcatcccagtgcctagtgaaatgagctaatgagatgccgggagatcccaggctggtgttaattggaacaggcgtggaagaagtggcccacgcgcaccttcagttccttcctgccttacctgcgatccttttctctgtctctccggtgtaggttgcacagacagcagatggtgtggatgctgacctctggaaagacggcttatttaaatccaaggttaccagatacctgtgtttcacaagatcattttccaaagaaaatgtaagtctagtcgtagtttccatttgctgagtgagcacaagtaatttacattcctgtttggaatttcctcattttgttgttgttgtggtttattttcattgccatattaatttatctgtggttttagtgaactgggtagaatcagcagccagcactgtgtttcatttattaacagtgttattaaccacgtacccaagtgtaccgtgaattccattaaattgtgttctcaaaaggaaaccaggaaatttctctcccagctctcatttgcctacctttcctccaagcaacagatcacagggtagtgcggcagtgagagttctccagtggagcgggatttaatgctggccagcaaaggcagcatggctcagggagggcccctgtgaccccaccccatgcccttgcttccacagtgacgtttcctcgctctttgagtctctgtgtgacatatcacatttcgttatttttgtaggtaagtattgactcatgtagatttctctatgcttttaaaaaaaaaaacaaatacttgcacctgtaaattaggaaactttaaagatacctactaaggtttttttttaaaaaacatctaataagatattttaatagatggcttagaaagaaaggaaatagctttggtgagtatctgctctgtacaaggcctgccctgggcacctcattctgtccccaggtaatctctaccagtggaagttcctttccattgaagaaaccgagatccaagagggaatatgcttgttcaaggttacttctcttccccagccccaaacagggagcagttgggattttcattttcagggctaacattttatttttggccatatgttattgtctctttgtcatgtaaatttttattttgggaaatatttttatttatttatataaattatattataaaagtaatatttatttgcagttaaaaaaaaaaaaactgaacccagacaacaaatatcctcattcaacagcatgaaagggggagagcattagtcatcctctctgccacctggccccgcaggcccagggtcccatcacagggtcctggcgtgtccccttggtgttttctgaatatcgaccatcatgtggctctctggcttgcactcttttctgccacccattcctgttgtttgtggttaattctttgatacgataattattctgaacatatacaggactgggagaaaagtcattgctttattttttcccctaattacaagagcaatatatgctccttgtgaagtacagagtttataatggagtcaggggaaatcttgacacaaaagtctggaaatcttttcaattcaggcttttgagtgtattttaaataccaggaaggtggcagggctaaagagtggacaagggcactgagatcttataatgagtccctgcaggtgccccagctcactgagcagcctgaggtacccaggagtgggctgaaggctgagtagaggcttcagttaaaaatgagtagaggccgaagaggcttcagttaaaaatggcctgaggacagccatgatctctgtgatcattttttaattttgttttcattgcatttccccccagagactatggggtgttggtacctaggctagcagagtccctgcatcccttggagtggggacagtgacaggcctgaatgtgacaaagagaagtcactggggcttgttagcattgggtgtcatgggtaagtgtattaaagaaaacacattgatttcatcaacatatgttgaacattaaaaagatatttattgggcatgatggagggatgtaagaagaggacaagggcagtgtgaaaagcctctgcctcacttttgaagcagagtaggagataggtgcgtggtgcatattgtttttggaaaaagaatgaatggatccaatagtgcgatccaaacgatcgagtaccagcagttggcaggggcccacttgccagcccaggagtggaggaggaatcagaatattttaatctgttacagccagtctatgctggccctgtagtccaaaccaagactttgcagaccatcattttttacaactgtaaaggagggatgtggggtctcaagactggacagattcttaattagctgacttgagactcccaatgtaggagttttgggagactcctttggaacccaaattcctttcccccaataatgctattaatacagaaatctggctttggagtgacattgcttcctggggaaggatcgagattaattgcacttttcatgccctgtactttctgcattacctgtaataataatgtacatagattaggtagggaggatattaaacagaaggatttatgaacatttgaatattaagttggttatctgtggctaccttaaatgcaaggttgtcaaaaataattacagtatactagcaaatactggctaccagagacaatataaataccctgagtcagtgcatattgggcttttggcatgaatcatttgctcaacaaggattgggaatacgttcttcatatttatgaggaggaaatgaaagagagaacagatgggggaggggagaggaacaggcaaaattaatggtgtcgcagacccactgtattaaacccagtacagtggcagccctgtgtgaggagggaccacagttgggctgtggggagctctgacagtgcagcctcccattttgtatgcatgcaagggttttttgatgctttgtttttaatggccacaccactgatgttcaggttttatgatcagggacattggtagagtgtgtggagggtgaggtcactaagtggtttgcagttgacttctgtaaaacccaacttgtcaagcagaagacatttgagaaggatattgatgaatgcccatccatctgcggggcaggaaaacatgcctagttgttaatttctcaatgcagaaagcagtgatgacatggaaaagcaactgccatgaaaaaaaattatgatagattagaccaggcgactctgaaagcagctgatgtttgcaagttaggttaacagttcaaacccttcctacacggtcagagatttattccgtgttctgagggtcccacttaccactaactaggctgcactgtacattgtcttcccgaggcccagctacctggaatgtcagaatatcaaattgttggcaaatatgatagttctgagaggaagaaacggtttcctgatggcagtgccgtaaaaacactggtcatagattacacttgctgctatgaccttcctagttaaattctaataattggtttcatttgtgtacttttggttcataatatttattagtgtatatcaatacttttgatatttttaatcatatagtttagatttgacatctcagcaaactcaacttgatatatgtgtgtgtgtatatatatatatgaaacgaagtcttcctctgtcgcccaggctggagtgcagtggcacaatctcagctcactgcagcctccacctcctgggttcaagcgattctcctgcctcagcctcccaagtagctgggactacaagcgtccaccaccacacccagctaatttttgtattttttttaagtagagacagggtttcaccatgttgcccaggctggtatcaatctcctgacctcaagtgatccacctgcctcggcctcccaaagtgcttggattacaggcatgagccaccatgcctggcagatttttttttttttttttttgagacagagtctcactctattgcccaggctgaagtacagaggcatgatcttggcttactgcagcctcaacctcccaggctccaacaatcctcctacttcagcttcctgagtagctgggactacatgcatgagtgccaccacacccagccaatttttttaatttgtagagatggggtttcgccatgtttcccaggctggtctcaaactcctgaactcaagctacccacgcactttggcctcccaaagtgttgggattacaggcatgagcaacagcgcccggcctccagttcgatttgtgactctgagtggcccggttgaaaaatgtgcacccgaaattaatttattcagcaagtagttactgagcacctgctgtgtggcaaaaaccatgctaggcttgtatttatagtaggaacagagatagttttggtcttcatggttcttaaactctagaagcaagacagatattaaacaaataaccccataaattgataggaagggaaaaagagagtgccaagagggaacataacacagtttagatgataagaactccctgcttggctttcagagacgtgacacagtgcaggtggaggtgggatcttggctcccatgtgcagagatggaggtagcagcccttcttctctaagcaagatggaacaacagcctgagaagttgctgtccagggcagagtgatggctgaccaactagatgcttgtccaaggatgctgaacaagtaaacagagagcatgttcacactgggcttcggggatgaggcacttctgcaaaatgggcacgtggagtgcactgctagtatcctaacaggagagatttgggatttgagcccatcattctttccttaactggctctgacgagagagggggaaccaagctgcaaattactctgaagattttaatgaaatctccaaagtggccccacatatttaagttgtagggtagatatctttagagctcatttccagcttgaaatgtgggctgcaagtgctggcgtgtttgcaaagaattctctctcgcaattacagaatggtgtactgtcttagaaagatatttgtacaccagttaccgaaactgcgcactgtggaccccatatactaccactaaacagaaactttaggaggcccttgtgcgtgtcattttagaagatgtgtaatattgaggcagcagggctttcactctgtattagtgtatgattcttgggattttgcagaatgtatctagcaactgaaatgtgtgtcagtatgcagactggtgatcacttaggagagtgattggttccctgttaggtttagatgcagctctttcctacgagtgcctcaggaatttgctcttcctaaaacctcctggccttgagatctgatgctcagggctgaatggcagcctggtcctgggacctgtgtgcacagctgccctctgctgggttatgtctaaagcatctcctgggttgctcctgcctcaccaaggccgtgtctgagttgagtggctttgaggttccgcagatgaaactccttcccaggggccacacgagtccctgcataaccactggggaccattaagtgtcacctactctaattaacctgctgtcataaagctgcacgagtcattgtgttaaatatgcatctggaagccaaaatggcaaacccaccacatgcatgttcagattaatagtctgtatctcttttctttcttcccaagagtcatctggggaacgtgttagtagatatgaagctcattgacatcaaggacacactgcctgtgggcttcatcccaattcaggagacggtggacacacgtgagtcatcctttagtagcactcatcacaatgagcgttttcttcctccaggtatatttgtaggtgtttttctatgtgcatttttcttcagaaacacttttggaggccttactacatgcccatgaacaaaccctgctgcttttgatgtgtgtctggctgggttctccaaggagtttgcagagtattctgggtagcagcatgtaaatgagcagaacgtgcctttcttttagaatggtgctccctgctgaatcggctcactggggaatggaatggtgaaactatacagtttgtctttagtccttcctctggtgttgctgaagccaagcttggcataagacccagaaggaagcggaaagaaaacaatcaaaagacgcccagagaacacaaggccaataatgtgcccatttggggcccgttgagcaaacaagaaaagtgagaatcaaaaagactgcaaattaaagttcataggttcgaattggactgaatattctgaccactgagcaggtccaagcagaagtgaatcactgaggaatcggcagcgtcttcagggtgttggagcccttggagcttcttgacccacacatgggttattaaatggtgctggaaaacctctggtgattcggcttccttgttttggtgtaatttaacttaccttgtttcatttttaatcactggtcagccaactttatggtatttacaacagtgaagcaatgaatacaaaacaaatacagagaatcctttcattacgactcagggtttatttattaaattctctgtctcattttctgtctcatactttattctttcataattagccccactttggtcccactgttttttgctgttttcttgctagcacttcatatgatatgaactagagtttctatctttacgcagatcccctgctgttattttcatgaaaccagcagaccccgttgtatagcatatttttattttcctgatggtctcttcacatttcaacattggattgctttttgtcatttattattttatgtattgcctgataatcataacagctgatatttagtatgcatttactgtatgttcacccctgtgataaatgctttacctccctgatttcatttaatcttcagaagacccctctttagagatggacattattatacccatttcagatatgagaaaaatgaagcacactcactccttagggattaaagaacttagccaaggtcatgcatctggaagtggaggaataactagaatgctcacatacgtcttactccagccacacttttaaccacggcggcacactggaagagcatgtgtataagcaccttttacagatatgttttatattaatgtacagagttttaaaaaattaagctataactcacataccgtgcaattcacctatttaacatgcacagttcagtggcttttagtaaatgcagagttggcaaccattatggcacattatatcacccccaaaacccattttcaggatatcacccctgtaccccttagcaatcactctcttattgctctccaaccctcacctccccactccccgccagccctaggcaaccactgatctactttctatgtagatttgcctattctggacatctcatataaatggaatcatacagcgtgtggtcttttgtgaccagcttctctcacttagcatactgttttcaaggttggcccacgttgtaggatagatcattatgtcattccttcttatcaccaaataatataacattatatggatataccacattttggttatccattcaactgatggatatctgagttgtttgtactttttggctgttaggaatgaggctgctatgaacattcatgtacaagtttttgttgggcttatgttttcgtttctgttgggtatctacctagtcatggaattgctgggtcatatggtaacttggtatttttgaggaactatcaagtgatgtttcaaaggagctgcactgttttttattcccaccagcagtgtccttagattccaattcctccacatcttcaccagcaatttgttattgtctgtctttttgattctagtcatcttagtgggtgtgaaatggaatctccttgtgctttctgtttgcccttctctgatggcaaatgatgtttagcatctttttctgtgcttgttggccatttgtattatctcctctgcttaggatctacagttttctccaagacttggatcactttcctccttttcccctgtgtttttcacagttttaaaatttgcattggtgttcgttttttgacagtcagttgacttcgaatgtttttatattgatgtgctgtggagccacaatgggttttccattctgcattttcctctaggttagttggaccagttcactgaggctctgtcctgtctgggcttggggcccagctgctgtggggcccaggggtcctggttgggaagtttctcccttgtgactgggagtacacaggttgctgtcccaagtgtggactctgagatcggtcctgggcccaatgccaggtgccttgtcacacaggagggtgggcagcagggggtctcttcatttctggttctagcaacatttcctggagcttttcacccagggaacagaggagcccaagctggccacataagccttatgatcagctctgtatcatctgagagtattcaagaccctgattttatacagtcagccaaaaacaggagactcctgtaattcattgaaaatatggtttgctgtaatccatatagcactgaaaaactggaagatgtttgttttagtaaagtgctgtgtactttctctgtgttcattagcatgactgaacacatttctattgactatgtataatatgtttacttaaaattaggcctgcttaagcatgtgtaatcagtggctccatctcttaaccccgagtttgctgcagacggaagaatggagccaagagcagcgtggcaacagcaagtgaaacacccggcgttagttttctttgtgtaaaggtctctcttcttcgtgctttctaaggccgatctgatcagctgataatctttgaagttgcagagttgccatgagcagcgcccccaactccccaggttgctgtcccaagtgtggaccctgaggttgggtcttgtcacacaggagggtgggcagcaggggcctcttcatttccagttctaggatcatttcctagatgtttagcaatgtttagggtctggattcagaacgttgtttctctctgctcgtagatctgctctagccctcagtttctgtgcctgaggaacccacagttatctgactctttaaaaaacaaccctacccccctcaaaatataataacaaaacaattccactgattttcttgtccccctccccactcccggcccctataagaaaccctgggcaggactgtacttcccctcattctgttcctcaatttgaatgtgctgttgaatgtcttacttcctgccacagaattgcaaggtcttgaaacccaataccaagcacaggcataaattacatgctagaggcttacttgtcaataatgacggtaagatcccacacagctgttctttactgagcacttactgtgtgccaggcactgggctaagtggatcatatgtgttggcacagtgcatccaacccacatccctgtggggtgggtttcattaactcccttttacagtttaccaagactcagagaaattaagtaacttgcctgaggtcacagtgccaggaaatgttggtgttgggatttcaacccagatctgtctgactcgtgtattaaatggccgcagttggttgaaactcaggtttaaaagcacaaacaaacacacacctcccgttggtcagcactggaggttgctagagcaccaactccttactctaaggcttgataagtaagagaaaagaatcacgtgcttatcctttttttcctatacaaaacttatttcagggagaccaaatagttgatgaaggaaagttattttttacatatagaaggattctagctaaaaaatgcagaaggaggccaggcgcggtggctcacgcctgtaaccccagcactttgggaggccaaggagggtggatcacgaggtcaggagttcaagaccagcctgaccaacatggtgaaacaccatctctactaaaaatacaaaaatgagccaggcatggtaacacgcatctcagctactcaggaggctggggcaggagaatcacttgaaccccggaggtggaggttgcagtgagccaagatcatgccactgcactccagcctgggtgacagagtgagactccatctcaaaaaaaaaaaaaaaaaagagcagaaggaatgacagagttcaaaaatcaccattgtgaacctttaataaaacatggatcttagcaacagtcatcagagggtgagaaagtgctcagaggatggcagttggggaactgtgtgaccgaggtcctgggccgacgccagcagagctcagcaagaatggcccagccagactctgggcctcactatatgacagcctagacttacgtgtaccccggacggcatgcatgcctaaaaaacctaacctgagtctaatcgaggctttagctctgccagcctacaggaggcacaggggagtgacccgatttctccaacctgttagtgccctgaagaaaagggaacaggagtggttgttccagagtcaaatgatctgggaggcctgacacccagaggcagtgtttcagcatcctggggatccagatgcagacagactggagaaaacgtggatgtagactctctgttggatgatactcaggaattctgttcgttttgttaggaatggtgatggcatggtggtctttaaagaacagtgtcctggatgcctactgaggtattgatggtgacataacgtagtgtcgtcagggattcattttaaatatccagcaaaactgcaggggtgggaggagaggaaaccagcttgtccattgtgcacagcattgacactgggtgacgggaacacgtggattcattccactgttctctctgctttggggtatgtttgaagatttctgtaataaaaagaaaagaagtccgtgtggtgaaatgtgttaatgctcagggcgtcagtgtgcaggtttctgatggctgagcagtgagcagattgtggttgcggctcttagaagccacccagatttactgcagggtgtgtggtccccttctcagcagggggtgtctgggttgggtcccacatgcagagcagggtgactgcagccccggggaaggcaggcggcagagcgcagcccttctgtccagcagcttaggtgacctgccacttctgctgccaggaatagggcgtgacaggggatgtggttttcagaatagagattctggtatctctggaaaactcataccttttctattgtcctttccttcagaggaagtggcttttaggaagaagaggctgtgcattaaatttattccacgggattcaacggaagctgcgatttgtgacattcggatcatgggccggaccaagcaggccccgcctcagtacacgtttattgggtgagtcttaataacaggactgtcagctgcttctcttccctgagagcactcaggccactccaggcaatgaggtccaagagatttccatgcagccccccaggctctcagccatgggcctctgtcagcccagtgctcctcgctgcccttcctgctcagctgcggtctctctgagcctcggctcgcactgctgactccaccttagggcctttcctcccctgcccttctgcgcattcagccttgaagctcctctgggtccttccccgacaccctgtgatgccactggcctcagctcttcacactcgttattcaccctaggaaaggtcacagggacctattttgtaccacggggccaaggccactggatgtggatataagtgaggcaaaggccgtgctgtcacagagctgatgttctaaaagggacagacgagcaataaacaagaaaataaatgagataattccagacagtgaagaaagtgaaacacaatgatggagtgggggcctcttccgtgagggggtcaggaaggtgacacttgagcagagacctgaatgtcaggaaaccagccatgcacagatgtgaaggcatagtctttgaggcagagcagaagcagaaggagagaagtgggaatgagcatggcacgttctgggagcagaacacagccctgtgcagctggaagagccagggacaatgttgggacaagggcgagggttggcaggacctcctaggacatggcctggagtttattccaagcacgctagaaagtcagtggagggctccaagtcaggaagaaacataaatattacacagctgcatgataattccccagtaagcagagaactgctgaggcctgggcccgtttgtgtcttgttcctccagcagcctcagcactgagcatgggcctggctctgttgcagctccataaatacttactacagtgaaatcccagggtttcacttagggctctgttgattgtaagtgacaggaaacccaacccagtttggcttgagcaaaaggaataatttattggctggcatcacagaggagttggggaggcaggactggcatgcctggaagcggaagcttgaaggccggcactgggttctggtttccctgtctccccctggctccggtgctgggctctgttctgacatgtttccccctcgaggaggcctggtgctacagtagctccacctgcttttcatccaggttcaagtccagaggccaagagcaagtttgtgttcctgacagttcaaaagaagttctagaatttagtctcattggtcttgattgatctaggtagggtcatgtgcaccctgggcttgtcactgttttctggaaaattcttccattgaccaggcctgagcaggaagtaggatcagctccattggaactcaaggacaaaccacgactggtgctgctcctaaaatatggaggggcagtcaaaagtcagaaagggggtgagtggatgccagctgtccagaaggaaatagatgttcactgtcttcagtcaactgaaatccaggtgtgcactttactcggtgtggcagatggtttacagccccctcagccatgtgcgtcttccctggccagggctggcaggggccatgtgtttccctgtgggctcccagaggcaccctgtcctcctcggcttctgaggccagcctcctggctcaggcctgtactctgctttactcttgttcatttgagcccagagccgcctttgtatcagccagggcctttctgatagcctagacccggtgagacagcagatgagccctcgtggcatttgcttgaagcatgcagggagcaggtaccacagaaatgcagagtttcacctcggtgggtgttcagctctggcatctgaatgctctgtgtcaagatcatgtggttaagaaggactctgtgatcattcccttcctacacactcaaaaatcccgttttgcaacacggtttacactaattatgtaaacaggactacaggagtaggaaatagttagaataaacatacttcaggcacctcagaagcacccatttacatacaaatggcagaaaccagcaatttagtaatgaacttttaaatctaatttcagttgctatgtgtatctttaactacaaactatcctgttgtaaaaagattccatttttaaccaatttaaaaattttaaggaatagatatgtaccagtatgtaccttgataaaaccaaaggcttttttcctttatgtcactttggaaatattgctatagttttatttcatcttggggcaacagttcttttccagaggaagacaattccagtgttatttttaagcaaggaaagagaattcagtattcagaactctaagtcacttattcttaaaagcgggcacagttctacatgttactttgcaagggtttgggattgtcagttggggaagatagaaacctcacattgcaaacagcacctccaaagcctggcagctggaggccacggcccagaggtggagaaatcagtgcagttcattggaatcactcatctaagaagacaggattgtggttttacatggttcctggggtgttctgagaagcttattaggggttcccacagaataagtcattttccattttttgaagagattatattcctctacatcaggtcccaaagatgcagttctgtgggcaactgggaagttggaaactgaatatggtgaaaatgatcccgtcactattcctaggagcgtggctgtctcctcagcactcacgagtgtgtggtgtagtagggggcggggctgtggtgactgcgagggaggtcacaggagagcttatgcggcgtctgggaggccccttggtgtccactcctagttgtgtggttcatggggcctcgagttttgtagtttgaagatgactcccaaactgaccctgagaatgagtccaacggcaggtgacacccagctgcaagaggctgtatcctgagattggagtgtgttatagagtagggggctaattcttctcatggttaaaaaccagcatctccctatctgtctctcctaattgcacaaaggacttgatgtggattatcacgtcacactccacaaggaaatggcaaaacaaaaagaagtttggagaagcaaggaaagtaccagttggagtaggaaggcaagcttgggaagggtgatgcaggcggccttgtcccgaaggcctgcctagatggaacgggtcaccctcgtgtgaactatgacacccagagcacaaaggagacggtggaacccatttcacgtggagggcaagaattgattccctggtgtttgaggccatgactcttttaaatgaattggtttgctttgtcactcaggtaaatgctttgtgctaaccagagccatgaagatttctcttttttcctaaagggaactgaacagcatggggatctggtatcgaatgggcagagtaccaagaaatcatgactcatctcaacccacaacgccttcccagtcatcagctgcctccaccccagcccccaaccttcccaggtgaggccttgtcggggtgtcttgcattgtcctgtggtcttaggtccctgcacaacattttagaacaccaccacttagtgtctgctgaaatactgcaaagtacagctgaataattgtagaagcaatatatctttagaggagatttttaaaaatccacttggaaatctttgcattacatgaatgcaaaggccattctatagtctattttgtgcgtgttctgcaggcttctaaaattgcagattatgcaacttaaaattggctccctattcaaaagagctgctagctacacacagacacgtgctgtatagccatggggttgggatcactggccttaaggtcaaattccttctctgtcttggccagcaactcatttgaaacccaggagggtaggtgagttcttatattcttcattttcatataatttctttttccaatgagctataaagtaagaaatgggtagtttgggtatgagagaatagtgaggagtttttcaggaaatgctagttttaacaattgtctccgcaaagaaacttgggtgagccaactgtttgctctgcaactgatttcagtcataacagaggtagtaacagtctctacactttctgcaaaaagaatcctgtcaaataaaaatcctgtgcatcactaggagtaaactaagggcaaggaacaaacagcactgatggattaagcttgagaaagggattgcaaaagtaaataaaacaagaacggtgaggcagcaacacttagggattgacataacgtaaatgagaatggatctccaagcttccacgtgggtgaatagagatgaacaaaatctgtcaggaaccggacagaagagtcaccagtaggtcttcctgggccatccacaatacagcctgccctccgggacataccaccagctctctgtactctgttcctctgtgccaagcctccgtctcacttggaagaatgtgctgtaatgaggctccaaagccctgaggactctgtcctctgggacatccccctataaagacaatctggtccttctcatgacagtttcacaaaccaagagtggtatttaaacttaactacccctggaattgcctgaaactttagaagtagttttcagtttcatttggcataaaaagataggaatctctaataagcctcccagagttgcagggtgaacagttgagtctctgttgggttcaagagtgtgaggttcgcactgcccatcagcacttgttcctcacttctgagccagagcgctgtcagctccgccctggagggcactgctgagggtcactgtctcctgtgctcaaggctatatcaggtgtgtcacctgtgctggggagtcagctaagtccatcacctgtgtgtcggggtcctccatcacctgtgctgaggcccatcacttgtacttggagcagctcaagtgtgggctccttgcagaggctggaaagcccccacaggagcagttgccctgaagttgttacagctgctccctgctgacatcatgtggtctagaagggcccagaaatgggcaccacctcaggcaggttttgactttctgtggttaaagaaagaacaccagttctctcatataaagcagagagagctctcagaagcctgctggtgactgtgagagcaaagtcacttgcacctgaagcaagacagccgagaacaccgagccaccggcagcctggtgggtttggagggtagtgcgtcagaaccagatgtttataaggcttatgtattttatcacctctgctgtacagtttatggtttacaatggctgcaaggaaatcggatcagttttgttttacttgccaaataaaacaaatgtcaaaatagtcaatataaaatgtattctaatttggctgagttaagtcagccaatatgcaacaggataattgaatgttcattaatgcttccaagtaaaagccatttgtctgtcccaagttctcctgtgcggtaatttacaggtaggatgcacacctatgtaagcctcatccatcagggttttttggtttttgtggggtttttttgtgtgttgttttcctatccagtatctttgatttattttaaaatgaaatgttgattattcattcaaattttccattgaagacctaggaaaggatgagtatgctgttttattccttgaggcttcaggtctctacactctccagaggaggaatctgatcacctcccctctggtggggagcagtggctggggcttgtgctccgagtgctgggggtctaccaggagcctatagggtaaggcaggcccctcagtggggcctgcagggctgcacaccagctccgggatttcctgtcttccctttcccagccagagccccagacattaagctgcgctggcagcctcctcctcccctggcttctgcgcctttgctcccggtgctccctgcacatgaggtgtgtttgacaggtctcagcgcagaggacttctctcccgggaagccctcccagaggctcctgggctgggcctgtgctgggtcttcttctgtgagcgcttccggggcatctcgagcccgtgtggtggtgagggcatgtggtgagcctccgaggagctccccagcgcctgcctgaatccaggcacgaattcagtttcaccataaatgcgtccctggcaacccctccagactactccctggtccctgagcactgcgcgggtcttttcctatggcgagagtaatccaggcttgtagaaaattggcagaatgtagaaagtatgaaaaaacaggaattccatttcccacgagcagatgcttataaccttttgttatatttccctcaagtctttttcttgtgtactttttacataggtgatatcatatcgtgtaatagcaagtctgcatcttgctactcttttctcaggtagccttaaccataaacctgagaaccacgtccagtgcggtctttgtgtggcgtggatcgggcctctgggagcgcggtgacgcagcgccctctactgcccagccgtggcggtggcggggaatgcggttctgagccggagctagtggcaggctctttcgccgcagagccctggcccaggccagccaggaggacctaggaagcggtgggtcacagatcttgctgccttcttgagtctgtattcctctccaaagccaaaaccatgtgctccgcctccatttcttgtgtcatcgctcagatttcaaagaatttcctgccattttttggaatgccgttcattcccagctttacttcagacaaaggtggatctttgcaccgtctgtaggccatcacctgaggacctcgtggttctagcagcactgccttctctgtccaaaagcaggaactgcctctagaagcaggagcttcccgcagaagctccgttattgcagaaaatgctgtggtgtcaccggctttggagttgtccttttggagcaggcaggtccccagggagagggatgctcctgggctgtatccagtgagttggtggctaaggtggtagaaggtagcttggcagagctcctctccctcatacagtgatgcttcatctcacatacagacatcgccacacacatctcttgactgtcttctagtgaagaagggcagccacttcttctgggacccagagcctctccatatctctggccgcaggcgctccatcccctgcctgcctatgtcatgcacgtcgatcaacaggagagagctggcctggggacggaggcacagtcccatctctgtggccctctttggggctgggcccagctttgtgagtcagccttgggcatgtgatcagatggtggggtttctgattcagctctgtgatgctgtctggggcagggggccaagagaggaaacaccttcctggcctctatcagagcagcccctccaccgtctgtcacatgcagggcgtcacctgtttctgctgggaagaagaggttccgctgctgctgggacagaggttgggaagagccccaggaggcaggtgggctcacaaccgctggagcaccagaagtccccagtgtgataagggaatggctctgtgtcgacccaggaggagtcccctggtgggctgcagccctctagctcagcaagcagcagaaccatggcttgataaagacatcagaggcatgcttatcaaatttgcagatgatgcagagtcattagggtgagctgacgtgctgaatgatagaatcaatactctgcatctcctctacagccagaacaacctgctggagccatgggaggcgatgggcgcaggcggagagggcccccgaggttcaaaaatccatcacacaggagccaaactgaggcctggcttagcagctaagtgtgtgaaatggcgggggtcggagcgtgggtgtgtggagtacagcctggtgtgcacagcgggaggccctgagtggagtcctgctcctggggcgtgtgcactgcctcacaccaccaggcagaggttacccaaatccagtgtcaagtttgaggaatccagtttggagctgagtagagacaggccagcctgctgcagatgtcttaagggtcaatggcaggagagaaagtagaagtgtttccaggtggggatggaggggtggagagatggctgggggctccagaaggcagaattaggtcaggtggactgaagttacaaggagatagatttaggcttaacactttaaaaaaatcagtaaagacagcttccccaaggtgaaaattctgtggcatcaagaagctgacctgaggggtgatgcgctcccagatgctaggggtggtcagacggcatttggatccttcagactgcaggagaactagagcaatcagtgtttcttaagccgtatttaaggaacttgtcatattccctctccccacctacagaaattcaggttcggcagaactacgtgttagggtcacagacaccttgtccagagaacttcagggccctgcagtgggcagggagggcacagagcagtgggccttggtttcagaggtcctcaagccgccgtcgatgctgcttctgtatctgacttgcagccattgccttcctccactcaccagtgccgaggtcagaggaggaggcatggatagtggagagttgctgctgtgcagcctccctgagagggaaggctcagaggggcctcccacaacgtccggggccctcccttggtgatgcggacaccgtgtctccgtccagggtaggcaggcatgagctgacgatgggtggtattctgtccctttcagagtctgtcagaaacatgtagtctggcctccagctggctaggattttcgggacatctcatgtttatgtgaacatccatcctgcgggggctctcctagaaaatctgcaatgtgtggttccagtagcctcaccccacccttcctgctgacctgggctgtcctcaccatggtcctgagggagaagctgctgcccaaactctcctccccacagaccccaggccatgggcacatcctgtgacctttccctaacactgtctctcttgggggaaagggttattttcccacccgaagtcacagagcatttcccagccattgagttctgaccggcagcctcccctgcaagatgcagctcccaggagcctcttggagtgtcagccaggcctgggttgcccgtaggaggtgacgtgttgctcgctattgcagtcatcttcctgtaatttgtcagctcccagcaagttgtcagtcacaggttcggaagtatgtttcttagtgacagacataattgtacttaactttttgcatggatgttatcaatctgtgacagatactctgggaaatggggcattttgattgcagaagatctgtcacatgcatttagtcttcctctcagggacaccaggattcagtcacaacttttgcatgtcgatgtcaggttttgagaacatagatccttgctgacctcaaaaatcgttccatcactctgatcccagggctgtcatcggaaaggttaatggcccttcctagaggagaggaaaaatcatgccgtggtgatctagaattcaggccgtgctgcccaggcttgtcccccatcacatcattgtcagaagcccatgagcgtgccacgctccgtcctggcctctccaaccccgccttccctctggacatggggatcaactccattactttctgattaactcgcagagtaagtcagcagttggggcggagccttaggtcactggctggagccttgttgtccacactgacagcctcaaatccttcggctgccttctgtccgttttcaattgtaagatggcccttgtaccccagatgacatgtcacctgtcctgttgttgcaggacttgaacgaaaggcccagaatcccacagatcagggaggctgagttttccttttcctgttgaggtgtttacctacctgttcagagtggcaaaaggcttggtgctggaggcatttgcctgtgagaagtttctccctagggttcagtaggggaaggctcagtgcagaggattggagttgaaatctgtggtttcatgtaaggtgcatcatttatgagaggggttctgtgtatcccaggtgattccaatgactctttttgtcccctagtaataaattgtgacatggattttgagctccacttccatagtggcaagaaatggtttgggggcaggtgagctaagcaatggagcactctgtcctggtcccatcaaaagagggcttggggcgctgggtgtggtggctcatgcctgtaatcctagcactttgggaggctgagacgggaggatcacttgagttcaggagttcaaaacaagtctgtgcaacatggcaaaaccccgtctctacaaaaaaatcaaatacaaaaattagctgggtgtggtggcacaagcctgtggtcctagctactcaggaggctgagtgagaggatcacttgagcccggaaatcaaggctgcagtgagctgtgatcatgattcctccattgcattccagcctgggcgacagtgcaagaccctatcttaaaaaaaaaatggaagaagaagacgagggcttgggccctggttttctggcttgggggccttcagacacttctgcaggtcatgtccaggcataactatgggtctggcttcacttggaaaaattagatttcctcttccttcacactaaagccacacatgctttttgtttgttttacctctaaagacagaacatacattttcattgtcttttaagatgaagactgtagcgcagggttctttacacaaggagcacggacgtcagcacgggggtgtgaatgatcccgctgcgcaagtggcaccttccagccgaaaggaccagcagccagccctgtctcagagacgagccctctggaggggtcgaacctgaacactaaatcaaagatggatctggggtgggcttctggggctcaggtattgtttctgtaaatagcctgcatttacattctttgcctgtaaccttaaagtctgtggtgacctgataactgcactggggttttcagacacacatatgttcctttttcctcaatcgagaacttcactggcttcctgttatccgaccgccccccacacatcctcttacattaattaggtgagtctcctcttggctccggggcacaccattcttattccaaaagcatctctgctctggccttcaccatgcacctcagtttgtaccagccccttccctcctggaagagttaggctggactccagaatgcttaggattggccctggccagccccaccccaggcctatagtagcccacatcactgctagaaagcctggcctgcgtcgttttccttcttctcctccagttgcctgcgtcatacagcctggcatctcacagttccctgtcattgctgcgtgtatttctgtttgatcttactgactagatttgctgcttactgatgacagagatcctcatgttttcctttttctcctttaaagcctcaaaagaggctagtcacacagaaatagcaatgatgatcatattgcatcaccgttcatcaaatttgagcaagtactttcaaccatgtcatctcattccatgctcacagtaagtgctcagtggaaaatgtgtggccccaagatggtaaagaactctgaattccaggtggctgacatgtgttaggcacccagaaagtatttattggatgcagaaagtgagttagtttaatacataggactggacatcatattttatgcatcgcccttccatccgtccatccatccagcagagacttatcatgcatttattaggtgtgaggtactgttcaaaggctttacaaataactcctttaaatctttttttttttttttttttttttgagacagagtctcactgtcgcccaggctggagtgcagtgctgctatctcggctcactgcaacctctgcctcctgggttcaagcagttctcccacctcagcctcccaagtagctgggactacaaacatgtgccaccacgcctagctaattttttgtatttttagtagagatggggtttcaccatattggccaggctggtctcgaactcctgacctcaagtgatccgcctgcctcgacctcccaaagtgctaggactacaggcgtgagccaccacacccggccaactcgtttaattctaataatagctctgtgagtcagttactattatcagcccaggtttaagttgaggaaactgagggtgaggaggttaaatcccttgcccaaggtcatacagttagcaagtgtcagggctaggatctgcacccaagcaggcaagctactgttagtgtgcagactgtcacgaggtccccagccgtgaagcctctcatcagggagccaagcatgtgcctggaagggctggtgggtaggtggggtgcccattcaggtggccccgccatcttcctgtgcagcttctccaggctcctgaccagcaactggtgaatgaggacttcccagggcgtgtgggtggggaactcatcccacagaggcccctctggtcagaaaccgcctaagcggtcttagggagacgtgtgaactttggccggtgtccagcacacttgcactgtggtcgccgactgagggaacatgtggaggccagcccaggaggtcccagcaccaccatccctccctcgctttgaagcgggcgtttaagcagggttatgagcagtgtggttgattctggtgatcgtgagagtggcatgaaagagacctacagagcgaggttatttgaatatcttcaaaatgctcgtgaacagagcggcggccgctcttggacccgtatcaaacttagttttggtgtcagagtaattttgaaggggaaatttcattagaatgcagttcggtattgttagatatgaatgatgagtttaggctgagcaatacactttttgatattaatttttaatacagcttcttgggaagtcagagcttctatttaatgaagaattgacgattcgtcagttcagctcccgcttcggagctggccttggcgttcgcagtctcatgtcagatttttgacaaggtatttgctgcttgtaaatgtgttatctttgtaattttggtgaatttctgagtgtcttatttttctcagtggtcatggtggttatgtttgcttttttgttgttatcgtcccgagaagcagggttagaaatgggaaattattcccttctgagtccagctcgcgagtgcacgagggctctttgtgcagttggtttcagcgccagggttttgagaaaggcttttttcaggattatgaaaatagttttctgtgtgtcagaacagatttatcagttcactttagggtcggttttgtgaaccagaccatttagagaaggatattttaccttttatcagagtggaagctgacagtctatttgcaggtagctctgtggaatgtttcacctgggtctctcagtgtaaatctagctgccaaataaagtaaaaatgggcgttaaaccagcgatatttcccaggattttactaccaccccctaccccccgccccaactatgctgctctatttcgatgcagagtttcaattattaattgggatatttaataaaatcctttgcttgcagttacttttaaaaggccttttgagtttatttgggttcagtttttgccagtgggtagggtagaattcaatctgaatatccttcatgagcagcagatgttttgtttccagttgaataataatattaataattattattattagaataaatacaattattattatcatcattattatttcagctgtaattttctgggcttcttgtgccaggcattgtgtaaacgttatatatatatgtacacacctacacacacagagatagatatatatgtagttttaatctttataaccatgttgtgaggtgaataattgtgtcctcattttattttgttttggttttgtggggggtttttttttttgagacgaagtcttgctctgtcacccaggctggcgtgttgagaagactgaagcttggagagatcatgattcatccaagggcagagagttaggatttagaggggctgtgagcagaggagaggtctcaccataatgccctgcctgccttcaaggagcctcagggcttcctgatggaacgctgaccctctgctgtgagctcgaccttgcatgggaccaaaaatcaccgtccagcctgtagcccacattccacctcctcttcagtcatggctgtattttgttaaacaaattgttttccacagcttttgagatggattgggcagggaggagacaagtgttgcctttggctctttgatagaggatgtgctgcattcagtccagactgcagcttgccctgcgctctcacgcacacagtcctttatgaatctgactttggcagtcccccgactcttgaattttcgaaaagcggatgttttagtaggctggaagaagatgaaaagctagcagtgcccatatgttccttgtttttaaaagtaaggtcagcgaggtttagagactctttaaatatttcagtttataagattagactagatcatctggaatggaagtgtggtgcccctggtcccagacttggcttttttcttcatttcttttatatgggaggtcggtgttttggcattgcaaggttcaagtgtaataaaacttaaatgtagtgaataaataccatgatttggagtgttgctgtggctatgaaagttagtttcctttcttcatctttttttttttattaagtaatcagtgacttgaaaaatagcagattggtataaggattgtaacttaagaaactgaaaactcccatgctttaaaggagtataggctttgatatttttctgcggaagcattttcttcactcatttaaatcttcctaggctgagattaagcattcatcctgaaatgtacacttgaatagtttgaaattcaacacaagtgtatatttttagtgaagacattttctcttgggttatcagtggtcagtgatgtagtggtggttttgcttgaccccagggtatttacagaagcctaggatctgagcaaatatctagcccaaccccaagttgggactaggtctcacttattggtacagcacacctaatgttttatgcctttcacccaaaaagcgtttttacggccaggatgtgcccgtagtcaccaacagtaactgctgggagacacgtcagggagaggtagctgtggtcactgccttgtacaacagccaaaagcccaaagcaggagggaccctggccttctcccagcacacaacgagtgggagctctgtgtgctggccggcatttcctgtcacgttcaataggacacgttcactcttcatacttcttcaattctaaatttcagaagtaatttgtcactttagaggagggcgtcattaataaccattatttagaactgtcgagtcttcctctctgtgagtgtctgagttaagcatccccaaaattggccttgttggtggcaagcagtgcccccacactgacagattgagactaccccacccccaccgacgccctcacaacccagttcttccccgtctgcctttaatcaccgcgaggggggcgacagggaatggctacggcatgtcctcctggaattcattagcgttattaccaaagaccgtgttgtaaattgagattttttttaactgctaggaaaaaatttctccttaactatttcattttattgtacttaaaaaaaagaaagaaagatttttctcatcaaacttttggagcagaatggttcagaaacctgacttcagatcccactgggtgtggaccctgaattgtaaatgaagctgaaatcgcatctggttacccttgagctctggggagagggccaaggaagaacccccaaaccttccgatgggtggttaagaaaaagaattgccattcaatgtatgttaatgcacattgttattctttaacattaaaattccactaaagtactaataattactgttaatatctttcggtggaaacttacagtaaaggagcagtagtggaaacagtatttaagggcgagctgccggcatgataagaatgcaaataagcgttattagcctaatgattttgccgtcgccatggttgtgcggcagcagtgttgtgaatatgtcatccggcacccgtgaatttggaaagtgtgtcaaaacacaacttcaattagtttgctctaattatggctctggagagtttgtaactacatcactcctcattaaaagagattttcttatatggattaatgtaatatacaaaggaaagtttcaaagttcccgatgccattcgctccccccacgcaggcctgatggatccggatccggggtctgtgcctgcagtgggcccaggcagggggctggggcggctccctccttctgcctggcgatccacttcctgctgaaagtggccactgcaaatggagccttttccacaagagggtaagtgaacccgtcacaggcttttaaggagagatggctaacctgaaactatcaggatgtccctccttttcggcttctcggtggaggctggaagcagaaaggtctctggacctaccgtggtccagtcccatgtgtgcactcagcccttggccgtgtcctgagtccttcggggagattatgtggcaaaatgtgttgtttttggtcacgtagaatcacatagtatctatgaaatgttagtaaaagtcttttcagatagcaaaggcgtacattaaggaacgtaatcaccaagctgatgtatagttctaaatgctatcattgagccttggccatcttgaaagaagaaagagttcacatttttttgtcctgttgcaaacattcccctccccaaggacacctgtcccgcagcgcccaccttctcgagtcctactctgcggggtttggatggccaccttgtcaccttgcctcaaatcggccttgtgggactgttccttgagctttgctgcccccacctccaccattctgctgagcccctggccacaacggcatcgtgacttccattgtggggggggaatcagtaatgcattttgaacccaagagttaaattttagaatgctgattgaagaggcctgggttttggttttcctttgatttagccacacggtgcagatgatccaaaatacagccttgaaaacatttttgtgggcctttgcgtgttctctttgtcatcacttttggtgagtaactctgtgtgtgtgtgtgtgtgtgtgtgtgtgtgtgtgtgtgtgtgtgtgtcccttgggccttctttacaccactcacaggcggtgttactttgagtgagttttatcactctctgagcctgtttcttcctctgtgaaatggggatagaaatgcctcctttgcaggatttgtcatgagaattaaatggggggggacacagaaagcaccaccctggtgcccagtgagcacccatgcatgctggctttctgtctgtgtccagggttcaatgcagaacttagcctaagcatgagcagggcatccccttagacctttcctttgccaccacgtggctcccgcctgctgcagttgcaactccagtcaccagcacccctccagcaccccacagcatcagagactgggcacaggcaacctcccctgcggagctgggactagaatggctgtgttcacaggtgagcagctgggaaggggttaagatagtaattgtgtaagtcttccaggctttctcccagttctgcgataatttgatgaagaacttcaccctaattaaatattcaaattaggaataagtgtcaatatggcttcccattgcctggaatgatgattaattgtattcaaaactctagtggcccactgtaatctaaacctaaccgttgttcttgattatttctgcaccacacttgccatgtttttgttttaagatttaaactagtaattgatttgccatatgccgtcaagctgcacgtactttatgcatttaggaacttggggagtttggaattgtgatttccttcatcttccagtggcagcttttttttccccttgtccaatgcacagtgatttggttttgtgtgtgtgtgtgtgtgtgtgtgtgtgtgcacgcatgcacgcgcatgcatgcatgtgtgtatgtgttgcccatgaggaaaacccattctacagtcagcctggtaggttggagttgcattggtcgtggcaaatgggcttcctgaatggaaaatgaacaggtctgtgtttgcacttactttgtgccctgtgtcatctcagtaaagcaacatggcatggtggaaagagcatgaacgcacatcctagcccagccattttcttcagctgtgtgactttgggtgagttacttaacctctctgaaccacttttcccccacatatagggtactacttcccttgctgggttgtttacattagagatgtgtatgaacatgaggaatggtgcaagtgcccagtgagtagtaactgccatagtcctaaataattacaggagtgaaaattccaggaacaaagccttcacgcgggcctccctggaaagcccctcccagccatgcaagtcaaatcccatttcctacctctctgactcccggagcctccgttgcccatccttggctttgtgacatctcttgggccactgtctagactcttgaattactatttcattgctcgggcctcttctccccagccacagtcttttctttttgcaggtgggaccatggctcccatgtccctggatacctcccagggcctaacagagtgcctggcctgtagtagactctcaacagatgtttgttattttggttatttctttttttttttttttttgagatggagtcttactctgtcacccaggctggagtgcaatggcgtgatctctgcttactgcagcctccacctcccaggttcaagcaattctcctgcctcagcctcctgagtagctgggattacaggcacacgccaccacgcccggctaatttttatattttttagtagaaacggggtttcaccatgttgttcaggctggtcttgaactcctgacctcgtgatccacccgccttggcctcccaaagtgctgtgattacaggcatgagccaccacacccagttatttctttttcatgccactgttttaaaattgaagcatataaccatattgtcctttatggcctatcttttgatattcagagcttttactttgtgatataggagatttatgttcgtgtttcagttgacttatggataaattcctaaaggggaagatacacgtttcatttggtttcttaaactgtctcggtgccaggcagtgcctagcacacagtaggagcacaataaaaaaagtgcgctgagtcagtcgccacatcctaattatagcggccttgtgtgcctgttgatactggtccagctcccctggcatgggcctgtgttcactgggtaatacttggaattaagttttaggtctgggcatagaaggtttataagatagtgaatataactgtagaggaaataggtctcttttaagttttacaaaaccttacttgtcttggcttgtgtcaattacaaaacgaaacaaaaaagagactcatcagaccgtgacaaatgatagtaaactttgcgcatggtggtttctccctgaggttggctccaaaatcaatatgaaaagaaaaccacaactgaaaatattttagagcctagagtgattaaaataactgactttctgttttagcggaaacaagttacaagaaagaattacaatatctcctcacatctctgggtcttcacagatctcaatcgtaattcagagcctcacttgggaaacacaggggacttggagcaggaatcctggctgtgaagtcattgaggaggattcgagtgttagtcaggcccttccagctgaaaatgattcattttaattaccttccagggtgatccgatacctgagcatatggtctttaagaaataaggttccccaaactgtcagcaagtgtgggcaatggtcagggacctctttctgacaccattgaccagccttggagagcgggcgctctagaaggtgcttattaaaatgccagcaggtgcagcaaaggtccccttctctgtgactcccgcaccctgcttgtgccaggtgttttataagagcctttttcttcattaaatggcattcattaagcacgtccttacacctggcacagaagctgtgcgtcacagatgacttcttcccagtggtgtttgcaggaataatgtggaatttcatttagccatttgctgtgttcttcttccccttcctatcttaacttgatttttgttgcttttcatatttcttctgctgcccccacaatccattcctctcctttgtacatgacctctggtctttgtccaccagcagacacattatatagaaaacaaggtgtcccttcagcaccaagcaccaccacgctggatgctttcatacgtgtgtctcttctactctcccaaccacattgagaagtgttcccctagtttttgccatctttttttctgattaaaagaaataatttctcatccaaaaaaattaacacttaaaacatatggaagagcagtggggagaatccacactcccatcttagaggcttctgtcgtcaataccgtgagcctctcctgcccctcagtcacctctaagttactccctccagccctttgctgtactgtagcttagccgtgtgtgcccatggaaaaaagattgtcttatgggattgtttataatacatcattctgcaactttgtttttgcttggctggttttttggttttgttttacttaacagccagtctttgggagttgggcatttctacagaaaaatctctggctctcttcatctattcgttctgtcctactttagtattatatgaaaattccacattttattagcctcctcttattgatggtcattgggctgctcccagttcattgccatgacaaatgctgccccaaggccctggttcctgtcctttccttccacagctgagatcatattccatacacagatcccgagcatctcactccaaccctctccacaaagcctgtaaacatcattttatgtctgcataatattctgagtcagacatagtaacattatttccagtttttgagtagaccgtcataattaagagcatgaattgtgtaattggccccatcagcattcaaatccaagcttctgcatactctgtgttcaagtccaagctgtatccagcagagaggcaagctgtggagcctctctgagacacctgtggagtagggggggtctcagcaactcgccgtaggattgggttagggatcataagatgcatatgacaggtacacgctgtaaacaagtcaactgatgatatttttaaattttcttaaataggtcatttcccacatttcaggttctttcctcaaatctcaaaaagggaagaataaatgctggtccttttgtcgcattacttcccctttcttaagtattaaatttgaatcatctggaatgtattattaagtgtttctcctagagaaggtgacatgagtaatcttctgttgtcttcctgcacaaaagacaacttgaagtcatacaaaattgctgaatcacaactattttcaccttcaaaactggctgcgtcgtcttccagcatttagtatggcagaggaaaagtctgaagtcaccatcagtatttgccaggatgtatcctcttttcattgcattttctggaatcctgtgaaccccattggttgtgtgtgtgtgtgtgtgtgtgtgtgtgtgtgtgtgtgtgcgtgtataagggttgggagatcaaagtggcaggtgcctctgactatgagtgcgcctctgccttgctagtcaccactctctcgacgctgccctttgacagtctgggaggacagcaggcactgcagctgcctgggcagaaccgtcttcattatatgtggccactgggtctacaagattaatggtaacattttaaaaattcacacagacctggaatcagcactagaaaatacagatttaaattaacaaggaaaaagcagaatcccatcaaaggaaataaatcgtgctggcaactattgtctcataataaaatatattctataactgaagggcttttatatggagctgtctgcagcttagtggccatgttaattgaataaggtgcctaagactgacttgggggaaaaaatgaaattcccctcagcatgtatttagctggagccgtcatcgctggcagtgcgtgcttgctgacctgtttgttacagaacagccaatccctcctgcagagagacgtgatggccaccagaagcagcagggtgagagccctgtctcctccgggcagttccgtgggcagggggaaggggaggatagcttggtaacactcccggaggatttagggactgttccagttacaattctccagtgaccaaacagattttggaataataatccatcatttgagtcaagtggcagacatggttgtcctctgatggacagcccttgctccaggggtccaagacctactggggaaggtgccagaaggccttcacctcctggcactatcctaagtagagacagtttctcgagcctttgagtctccttctcctcagtctgctggggagctttatgaactctcctaaaatctaaactcatggatctgcctacagagtggtcaacttcgggcccactaaaatgactccactgaaactgctgtccataagtgcaccagccaccatcattctcgtggacctctcaggtttttttttttaatttttatctatttatttattttgagactggattataaaactggctaatttttgtttgtttgtttgtttgttttttggtagagacggggtttcaccatgatgcccaggctggtctcaaactcctgggttcaagtgacccactcgcctcggccttccaaagtcctgggattataggcatgagcccccactcccagccggcctctcggttttgtttgatgctgtcgagtacctactcattcttataactcccttggctgggagctgcagaagaggtgagtgtccaatgccagtggcctagtgcagctcctgatctcttgcttcctccctcctccaggtacagggtcgtgatcggggccttccttcagtctctccttggacaattcaacctgtttattctcatgaaccagaggcctttgtatgggaaagaagccaaagagtattgggttaactgaccacgattccaagcatgaaaataaggactttctgtctatggatgccagtccatagacactggatgctgtggtcataggcataggcactgaccaataaagagtcttctaaaatattttaaaagacagccaaatatttcatgaaacagtggtaccacaattttttaaccagtcctccattgtttgattgttcatctgattctagtttttggctttataagtagtgccgtgatgaatttattgtttacgtaaaaatatcgtgaatcagaaatagttgcattttccaagccattaaccaacccagtcgtggggatgagaaggagagaagagagaaggcttcctggaagtttcccgaaactatccctaattataagtcagaatcagatcaacaagtagtaggtaatcttagaggattttccctaatatttgttaagcgctcactgtgtactgggcattgttctcgcccctggggatgtggtgggaagaaaaggtgtggtggagatcatgttctggtgacatgaaaacaagtcagacagcccgatagagtgggaagggcgccacagggaggaggcaggtgttataagagtgtggcggggtgcctcctcagaagggtggcctgactggggagggaagccagccgctgagatctggggacagtggcaagtgcaaaggccctaaggcaggaacaagagcaggggctggaggaacaaaagcggctactgaggttggcagacgtgaatgcagggagggtggacaagatgtggtcagagaggagggatgggccagagctggcagcacttctcagccgtgggcgggtttggatttcatcctgatgcagaggaaaggccccgtgggttctgctgtggtgctgcatggaggccctcatgagccagactctaaaataatgccggggtggcaagaatggggagagtgggagtaggattgaagctcacgtacttgcatgtgctcacgcatgcctggttccgtgctgtcaaccctgcctgcatggtggccctctgtgccctgggaggcaacacacccctgccaaaggccatgtggctccctggtgctggcgctgggatttggacccacatccagcggactcgggggcactgccctcaaccactacaactggtttgcctccctgggtgtgcgatcgggccattggtcatccagctctgtatagttcactgtaacctgtcgggatcactgagctagtgagcggcagagatgtcatgtccctggcatcactgatttcaaaagggccttcaggagggaccctgtggccctgattgagtagtctcattttatatacccgatagtgaagctgaatcggggtaactctaacatagcgataaccacctccggaggacacatggactgacctcttcattaatacctagctttcccttcatcagctttacctctcagagcctcagtttcctattctgttaaatgagaataattactcctacctaaaaaggttgttgaggtgatgaggccgggtgatatattgaggacccccagcccaggtcctggcaggtggggctccaccccacgctggggaactggaatctcatctcgccagagacccagctgatggcagagccttcatccttgtctctcactttcaggctaatctgacaccaaagcactcctgggccacttctccttcggcaggtgacttgtcctgtttaaccacaggtaatctgtccctggggcccaaactgttcattctcattaatgggaagccttgatgtgcctttctgtcctgtccccatgtcccctgcttcctgtgtccaggagtagtggaagcagaaatgcaggggaagctatttgccatgtagggaggagcccttctccctaaagctttctctgcccagggggccttctcacctgctgctctctgactgctgtcccttacccactcttgcatcagctactttagctggagtattcagtaacctgatttcaattcagcagatccctactgagcagttattctgcagaaaatacagtcagcctgtgacttgaatcctcttttaatttcacatttgctgcatcaggcacacattgtctatcatatatgaacagaaaccttcttttttttcccttcttgtaaattcctggttgctgctgctgctgatttcttcttacccatacctggtttcctccataatggagagaggtgagattcagggtataaaacagagacccctggagcctaattaattgggaaaatacacacagggagaaatgaaatgatagagactaacagcagttcatgtcaaaaaagaaacccaggagttttagtgagccaactacaacacttgatttggtcaacaaatggtcagtaattgtctaccctgtgacaaaaaattgtcccagaaaatgaagtacaaaattgatgatatttggccctgctcttgaggaggtcacaatcacattagggaacaggtttatatcagatgaccaaagtgtactgtgatacctggagtggggtgagagaagacactcaggcatccaatccagtctggggcaagcccaggaaaggtttttccaaagagggcatggttgggtgggatcttgaagtatgaataggagtttggagagtcggtaaggaagaatggagattcctaggaagagggagtggcatggataaagaatcaggcctaggcatgagaaaaacaaggcctgttcagagattaacaagacttccactctttctggaggagaggggaagtaagtagtggcaagaggcagaatctggaaggtgggctggtgtgccggggatgtgtaagtgtacagagtgagaagacagctaagccagcacccttgcaaacagcaaccttgcaaagtttggagacgaagtgggagttggcggggtggggggtggtgggcagaaagaatcatctccaacgagggaagagaacctggggcgggggttgagttgcagagcaagccaggcaaaatctgaggccccgagggacaagaaagtttggtcccggacatcagtattgcatggagcagctgaagagctgggccccttgatttctctgttgttcatatacttttttgtggttgttattgctcatatatttcttttaagtcctaaatttccccaaaactatccatttagagggtctgtggcaagtcatgtcgacaggaatgaagtctctgcacaaagtagatagtgaataattgtaggctcatgatcatttcctgctaccattcccatccacattggcgccttagttttatttcctcactctcccacagacgggcaagcttttgaaattgtaaattggatgttggcacatttctgcttaaaaatcattccagagaaaggcagaacccatgctgggctccacgtggcctggccccaccgtcttcctggccttctaggcatggccaccctggcttcctcctaagtctggaggaggtcagactccccacggagcctcgagtgctcacccctcctccctgctgcatctctctgatttctgcctatcttcagttcccacctcaatgtaccttcctccaggaagccttccagggagccttctcctaccctgcccttcctagcacttgagtcttcccgccttccataggaaatgatcacacttgtaagcaagtgttcaggtaactttatggatattttcgtgtccccctgcctgtcctgccaccactgagtcccccacagatctgtattgatgcatatttgaccacccaacagctcggctggccccattttctcctctgcctcctggctggcctctttgccatcatccatgtccacctggctcccaaagttctgctaatgctcctgcctcctctgtgagcctccctgaatgcttctagctcctggagtgtttaccgcactgcacaaatcgctctgcatccttagttaggttgcgtgcacctttttagggctttggaggcttagaaatcttagtctggcagccatgaagcaaaatacttccctggctcctggaaattccctcattggtatagtgagtgcagttatagcacctaccctggatccttttagtcacacacacaaagccctgtgctcagaagggccccaccatgggtttaatgctctgctgttgccatcttgaaattcttgatagcatttgaataaggaccccatgttttcaacacgcactgggccgcgcatattgtgtagctgctcccatacctgcctcgaggggcgttgtgaggagccataggaggatgtgtgacacctgcattcccagggctggcacctggtgacactctcagcagggtcacctgtcatcattttagttctgctcaaccacaaccacagtcgataattcactcttctgtttgctcagcttcattgactaagtgctgtggtcagagacattgatcaactgctgaaaacccttctgcagctgctcctcaccctcgcagggttcccagacctggccagtcttcccagacctggccagtcttcagattcaccgctggagcttgttaaaaatagatttctgggctgcacccggccaggcccactgaatcagactccccaaggtcagggcctgtgaatctgtgttgtagcaagttcccaggtgactgacgccttcattaatgccatgatgggggtttaggaacctccatcctaggagtttgaacccaagcctcttgtaatggtgtttggcgccctttccatctggccctgcctgcatttctagctctgcttccgacgtgtgccctaaccctatggggaagtgctggctctctctgactccctggtgggtgcctttcactcccataacaccttgaggggtcctgaagccccgttccctttaacagaatatattgttccttcttttcatgcttaccagcactcagtttttcttgttctccgagcacatgtcacgttgcactgtgatttgtttctgctttattccctgcagcctgagctgagggagctcacctctgtacccttagttagcagcagtaacaaagaatattcaggttccctccatgcacgccagtgcacccggtggacacacttacagtgcatgtgtctgctggttccccaaagccctgagcgtacagttggtgcttgattcagcctggctgggctgtggctgagtgtccgccatgagctatcactctgtggctagcagacccaataccttcacagcccttggtgctcatcttgcccctggaaggctccttccggttccagctcaatcctggacctgtgggaacatcccctccctggagagcctttcctcccaggagtctttttttttttttttttgaggcagagttttgctctgttgcccatgctagagtgcaatgtgcaatggcatgaactcagctcactgcaacctccgcctcccaggttcaagcaattctcccgcctcagcttcccaagtagctgggattagtagagacagggtttcaccatgttggccagactggtgtcaaacccccaacctcaggtgatctacccacctcggcctcccagagtgctgggattataagcgtgagccaccgcgcccggccctcccaggagtgtttatgcacagcagtcattctaggtcacacatgtgctgtgtgaaaaaggcacctagtaattgaccacttactttatgtgataagtgttccctccagcagtctcttccttttcggaaatgtccgggtgtggccacaggttaggctcctgagctattgcaacacagcccccagttgtcccaccaagaggttttgttgtttttttcccccagtcctgttgggttttaaatattttcctattcgcttaatttttcttttcagcattcactacaggcagctggtgaccatgccaaatggattgtttacttttgactaaatgctcacttaggctgagtgttctttgtgagctttaatgactcacacctgagccatcaaagactgtgctgtatctgtctggaaggtgctttcctgagcacctactgtgtgcgctgcctgagggggaacacacagacatagcagttgagagcgatgtgccatcctgattttcagaggtcattagtctcctgaactcatatggcaataataattcccaacacctttgtttacagagcgcttcatgtgcagtgatcctcagcagccctgcggtgtaggaatggaagcatttgcatggctcctggaataaaccaaggctggtgttcagcgcctgggttgttacggtcttgctggtgcattttgcccagtgggcagagatctggatcaaactgccaccccgtagagtcccttgggcccgctgtaaggcttgggacacactttcttcctcttggatgtcctttctagtatggaaaaaaaatgtggctgctgatgtctagaaacttccaaattccttgagaggacttgagcccagtggaggagttatgcttgattgagaaggaggcgctggccagaagcacctgctctgcccgctgatctgtgctgcatttcagctgttgatggcgtcagtgcttcctgagtcttggggaatgctccttgtaatctcctttctctcgtccttctcttcctcaggcacatctccctaacacttcctgccaccttccgaggcaggaacagcacccggacggactacgagtaccagcactccaatttgtatgccatatcaggtatgtggagccaccgctgcaggccagctacagagtctgtgtcccgggcgccacctccttccacacgttctctgtcttctcatgggatctgtctgccttacctctcttttcttccctgcaggggacctgttccctgcagggaccaggccttccctttcctttgtgtcgccacagcacttagagaagggccaaatactcagcatgttttgaaactaatgatgaaaaacaatgtgtggatttcacagggttgaagggaggtttccagagaatactcgccacattgttcacctgccagacccgggcaggcttcccacggggcctcgggagcagcgccgagctgagccctggtcggctcaccctcccatatccaagtctgtcctcacctctcatttctcacagccaggtttgtggccagcgggtacactggcggtctcccctcacacccctggagcatgagtctgtggtttctgaactcggccttgaaattgatagtgttaccttggcaggaacttcatcagtcctagttttccttttcaccttcacccagggaggggaaaacttacaagccttattacagaattgagattcattaggtgcttggcagcacaggtgacttgctaagagccgaggaaacccacaaactcgcctccgattatcctgggccgccagtgaggggtgtttgtgtataaggggaaagtggcaaatcagtgccacttaccagcacacacccttaatggtgagtgacattttgaacacaggaacatggcattcattcatgttccataatgaatcggttatttaaaaggtaatcttttttctaaaaattgcaactacaggttactaaatagatgaaatagaacaatggcataattcttgtcagtattagtttttctcgttatgatcactccctaataggtttggaagtataagcaaaagccagttgttccatttctgggtgacattcctgctgagaaggggaggaacagggatgttcttaagcccccatccctggctccactgcaggagccaggctctccaaggggagagggaacgtgtttgtctaagaacagcatctccagggagaatttcttttgtgctgtggctatttcagcagagtcgacaaggagcataacaagtgtggaaagatgacctattttgtagaaaagctgaatatttccccagatgcttagtggcatagaggtgcagaacaggcctgtggaatccagcagggcgcccccattcagaatgcacacaagggaagcttcatcaaaacggatgactttttttctgcagctcacaaatctttttccagccacagcgtttggctacacccactttacctgtgttctctgatggctttcccagctgttggcgtttctgcaggaaagagccacagagtgaaatctcctatggtttggcaggaacactgctgtctgcctctggaccgctgcttcctcgccccgcagctttgatgaggtgttgtctgggttcatttcagctgttagtttagcaataccaaggtaacagcctcaagacacaggggaagccattcagaaacttcctgttacatttatgtaagtggcagtcaattggattttatcttccaaacagaggtagttgaggctacagcccacggcagcaggcaatttcaggcctcctcagtggctgcaagcaccaaattgctctgccagggtccaggactgctttgttgtgttgctgccagaaataccctgcaggacctgctggctccataaggcctgcaagctcagcactgggcaactatggtacaactgggaaggctgcccgcccacccactggcagcctgcctgcgagtcattctggctagaagggagcagagaccacctcccttacccccatatgaacagtatttggcactgagtggcctatctcagtttggtattgtgaagttagggtttccaatggtttcttccaaaaacagttaaggcaaagtgtgccccaggccctagcccttgcccagtacccatgccttgatagctggagttctgctgataatgaaatgaatcatcaaaccgttctgcctctgaactggccctggcacaggttcactgcagacttcaggagctgagcctttggtgcagactcctggcgggctctgtgtccctcctgaagacattcgattactgctcccttagtgttccatcccttcctaagataagtaggtttcaaaacagtgtaattagaaatttgaaaaacagcccacacttaatgtgtatgtatggttgttaaagtatattaacttttaaatgttttctcagtggcatacctgctagtagattccttttcctgtatctttcactaagacagttggctcccatcatggctgctaagggtgagacgtggcacagagttgcaagagacaccagtggagacgatatgtagtcccatccctggcacaaagcagtgctcatgatgtggtcatggaaggaaggaagagacgaagggaatcatttagcctcctgtctgccttgcacaggagtaccctcccaaaaccctgggccaggtagtcatcctgattttgctgcttgaatgcctgtggtgtctgggaccaccacctcctaccagcccacccatccctgtgagatccttcctcgttaagcagggctctatcttcctgttctttcacatccactcagcaatttgagacactgtgcattctgccgaccaaaatttgccagctgttctacacagtccagtcgtatctctctcttgcccacggaagtggggtgaggagctctaactcagtgctgaaatcctgagatgcctgtggcctgcgctctgctctcttgtaccctaatccaaacggccacggccacaaagccagcatccatcctcacacttgtcctagcagtatctcctagaaaatacagatgtgcaaaaagatttatccacaaggataagcaccgccacttctcaaaaataatacttcaagtcaggggtgggaggtggatagatcttaaatgccccaaacaaagacgaatgcttaaattacaaaacatccatacagtagccttaacttttcagccatctagaagtgatgacttagattaaaagatgtatgtgaatattgttaagtggaaagaaaaacaggtaacaagtcagaatatgcagtgatctcattttaacaattacgttctaagctgggagtggtggtgcatgcctgtagtcccaactgctcgggagactgaggagggaagatcccttgaggccaggagtttgaggctataatgtgctattatgatggcctttggaaatagccgtgcactcctgcctggggaacatggatcttgtctctttaaaaaaattaattttttaaaattaacaaaaaatacatctaaaggtctggaaaggtccacacctaagtgtttatggtggttttcttgggactttcatctttttttggcctctttgcagttactcattttccataatagcacgtgttgcttttgtagtaagaaaaaatacacacctgatgtgagtgtggcatgtccttggtaaaccctgccggcctgcaggatcaccattttctcctgagcactcatgagtctatgctttcgaagtttactgcagagcacttccagaccacagatcaataattttcttattgtcccttttagaaaatatgattttttttccctgttatgcagtcccctgaaatcacctgttcattcgagttcctcagagatcactgtctgtaattccagcaccatcctttatgtcctgctggccctctggatgtggactgggcaggcaagcagccggctgctccagccacctccctgccttccttgctcttcatgtcccccatcagtgtgtcactctgtagggttttgaagatggttttccctaaaaggataaaatgatggtcgcttggcttggctcactctgttacccatctgggttagggtcagcaaactaaagcccatggcccaatcccatccagggcctgttttgtgtgacatgcaagccaaggatggttttaatatttttaaatagttggacaaaaataaaaagagtaatatttagggacatgtgaaaattatatgaaaatctttagtgtttgtaaataaagttttattgcaacacagccatgcccagtcctttacaaatggtccatagctgcttcacgttccaatggcagagttaggtgtgtgcaggcaatgccggatggccaagaaatcctaaatatttactctctggccttttacagaaaacatttgccaacccctggttagggtcatcactcctaagccatgggtgctattcatccttactctttctagctgtaaacaaaatatttcaaaacaaccttttttgatagttcttaccttgctgactgtagctttcctggtgctggtcttactggtgtgacccctgtagctttgtgcctttggtttttcgagcatgcctttaagatcttacctctttggagggccctcttccgggtcatgttgatttctctaggttctactccaaccccactcctgagtttcctggtcaggactcttagtggctgttacttttcttaagaacatcttatctttcctgaaaagtcttctattttagtcccaaatggtggcaccctaccttttttttttcttggattttttaatatgtttagatgtctgcccattcactcatttctctttcatctattccaaaaggatttaaggtagctccaaaaatacatacggccaaatgaaaatggaagtgaggaaacacaagtgaatggaaataggatagaaagtaggtgcggctatgtgcaggggatatctagattaggttctgaggcagagggctgtcctttaggggtaagagagaaacaagctagttgcttgggaagaactgaactattctcttaagcccgaagagctgtccttcctcataaacagggtcccgtgggtcagcgctgactcccacatatgcattccttagaaagctgaacaaaatgagcaaaaaacctctaccgccaaaatgagtgctcttgttttctttatttctttagttctgcactttcccacattattgccacatgagtgttagtcctatggatacatattaaagctagtagacgtctcagacaacactggacatgaatgagagaaatataaatatttaccaccttgcgggggggaggagggctccataaaatgctgtaaacaatgtaacaattgcttttcaatgattataactctaagtttgataagaacagcttatacatatatatatatccatgtattggggggacacctacttgtttgaaatgaatctaaaatgtctgaaagttgagtgagatgtttcttaagaaatgttcttgtggtgggtgtcaggcaccttatgggactggagacctcggggaatgtcaggaaagacagatcttccccgaccccctgcccaaacctgctgctcacagctgccccagaggcttcctataaggagaggggccaccaaggagagcacagtgcggcttttctaacctaggagggttttttgtcttacggcaggttttgcttaacaaacgggactgtgggatgggaaatgataccatcctattcttttgttgtgtttgttgttgtaatctgatttctatctccaagtgcacagtttttaaccatagaaagcttatttatctcttttgaaaaaaaattgacatagtaaaattaagcaaatacctattaaaactggcatataataagaccaaaaaatctcgaacaccctatgaatgcagggtgagccacagtgcagaaactctgcaaagccacacagtgcagtgagctgcggggctaggactgctttcctctttaggacctagacaggttggctcactgacatcttcatttatccatcagcattaggctgactattaaagtgaagggggcacacaattgtcccaggacagaagctgtaacctgaatctatcctggcagactggggtgtattggccactcctctgccttcagctttttttcttttttttttttgcttttctttttgattgctggaaaagccagcttattgccctccacagctgtttgctttttaaaaaccagcccccctttcaggatgtttgacaccaggaaagatgtcggtgtggtcaagtcagtgtccatcatctcatcagtttggatcatggccccttgtacagagagaaggaggattttatctgtaactcagaaccgtgggtgagccatgtagctctgacattggagtaggaaagcacaaagcaattaaaaataattaatgatttctgaatatcagccttctccatgcagttttaatctagtcctcatttaaattggaagatggacatttaattatcagtattatgaaattcatgatttatatatttcatccaattggataaaatttctgccaccagcttttcatcttatgatgaaaaaaatgtgtatcttacaatgtgatcatttaaaaactcatctacagcataccaaacaattccaaacatattttcctttcatttgcagtgattacatgatttctgtctcttaattaggaaaaaaaaaactcacccgggaaattgaaaataaacttaatactttaatgatcaggaagcactgcagggttgggaaaatgaagggtaaaagactcaaacaatggggtgcttgagaagcgctgttctctcctgtgtcaggtgtgctaacacaactgcttggcatgttgtaatgttcatggtttgatgccacagaatttgcatccacattctgggtgtgccatgtgcctgtggttctccttttccctgtgctcgggtgagtgtgtgggctgagtgagtgtgttcctgataaccaccaaggagggaaagagccactgtcttctggtgcaagcccctgagtagtgttagcctctgctttcacaggggtccctgtggcccttgtcttcagtggatatgttctcgtggctcggggtggcattgcatttctgaccctggcttccctgaggttcttcgctccacagaggattttcgtaatcaccgacaactggctcaagcggtggtgggtgagcgtatgggagggttgccccagatctgagacaggaacatcagtttggcacagccactgataatagcatatgggaaaattcctgaatgaagtgaaaagatatgtataataattgtgcttgaaccaaggaggaaagaagtcattttaaagacagatacatttttatcatcacctataagaaccatttttatcatcccctataagaacccttgtctatccatctcctcttgccctgactgacaacaaaatcaagtataaagaaaaatagaataagaaaaagaagaaatgaatgggagcggatggggaattgatcgcatggtgtatttgtatatcctgatgtaaaaggtgcggctgacaggtggccaggtttgctccgtacacaaccatgtgtgtgctgtcaggcgcacgcacactgccttgtttcgattgatgaattgcctgctttcttgattaaaccttccgtcacttaagaaacaaaaagcctgtgtttagatggcagagtgggacatgtcaaaaaaatctgtctcctttacctttgtgcagatgttgggcacagactgtaacatgtattattaaaatgaatgtggcatttactgtgcattattcctttcctgggagaaaggactgtaaattatatgctaataataagctttaaccctttcgaaatgcaaaagatttaagagtgcaaatattcatgtaggcctggctaattggatgtgcttttctacatccaccacggtggctgtgtcactgaagttaatgaacagcgtgtgcaggcagacacacagggcacttggggaactcctgcctcctggaggttttctgcagtgcgagtgcctcctcctggacttcacagagagatagaccctgagaaccctgagctgggctctgggtcatcttactccagatgaagtccatggtcaggatcagttccccagcaggtcctctgcagctgagtgttaagcgtgggacctctcttcgcacacctgcattctcacttagaatgcagggcccacagaaggccgtgggcccgggccttctgggctgcagtctggcaggtatcaggctttggtgcccagcccttacttgactctcttccttgaccaggcttttctagcctcagcccagttgcccaggtagctgactcatctctccaaagacctccttggtccccttgctcctcagatcacacctttgtgcccctccacagcctgactgcattcattcagacctcagacctcacctgcctggtgttggggctgtcaacaaccagccccacccgtgtcccaccagcctgggtcgctccctgcgtcctccttgcctttgtcttgcgctatgcttgcaccgccactccagcagctcagatttcaccaccttctcttctctctgtccccggctgtggctctgaaggccactcccaagctgcctctccatcaggcttttctgattcctctcccgctgctgatgctctctcctggtttaccccacactactctgttggagagttttcacctgtgagcaccttgagtgagagggcagagaccatatttagagagaatggaggctcccctctttttttttttttaattgaggaggatgtaggtaaacaaaggcaaagacaagagcaagattgttcactccattcactcaacagtcaccgagagctgccctgtcctgtgctcctgagggcaagcctgctgccctgatagggcatttggggttggaagcatagggtcagaatcttggctctgacacatactggccatcatacagtgctgctgtgagcagttgccaaggttgtgcactgcacaaaatatgtgactagcatcctctagaactgtacaaggaccctgcacaatgctactttgggcaatgctagtatccatacctttaaaacaatgcagtaatgcccgtttccttcctggattgttgtgaagatctagggtaggtaagaacatttcataaaccaggaagcagtgtaggaatgtcacttctctccttattcagctcccctacagggatgtgatccaagaaagagcccaaagacttgttgagaattatcacatgggacacgctggcttgggcccagcacggtcttcatcttcttagccgtgtgcttccttatataattttgatatataagattacttctcagagtgctcagaggaaatttcttcctcagtccagagaaacttgcaataaaaggctctctggcatggctcagctcagtaccccctggaagccgagacattctgtcacgcatcaccacttagaagtgggctattttccgtggcaagcagcccacgatccctttctcaagaaggtgacagaatgatggcttgggggcaggaaggagagaagtgcttggcagcgtgaggctgcaacttctataaaatctttcaatgtacctttggttttttggaggaaaagtgcctggggggctgatttctgctctaggctttcatttctgcttttcctgtgccccatgggtaggaagaagttaagactttttccagttaagtcatcatgaaaaataaaaatattactaggtgacagatacctcagtgctcttaaacaggcggccaccttcccactgtgctttccttctctttttggtttttaagcatggcagagcttaggcggcactggtttaatgggccacatccccttcttaacttggaaaagggttaaatctgtggtccaggcagccgagggcagctggatgaagcagggtgggagcccaaacagctgggtgcaggccctgtctctcccaccgactagccgagtgaggccagcagagatcctagcctttctggatctaaattccacatctctccatatcagcaattgcagtaacaatatcgatcatttgaacatagcaataggtcggctcattcttatgggacgcttcctgtgcaccaggcattgtctggtgtttaaggtggaggtggtaatgcccacctcccaggacttaaagctatgtgggaaggaggcttgtatattctgcagcttgagatgccccaggcctcgcagtggccagcaaatgtgcatttactgcccctggacttcacagacattctgtccaaacactgccttgactgtaacgttcctaaacacatgaacacagaaaaaccaactttctgatacctttctccctgtatgtttatcttctttgtctagtttttcagcagaaatatgcccgtttccccctgataattcccttccttagagacagcataattgtagacctggccagagaaatgctgaaaacaaagggaacccccttgagcccagcccttcacctgctcttagcacttcttcagaggtttactctggagtgaatgaagtagtgtgaccagacactcctgcctagaggcagcttataccaaattagccttttgtttctttctctacctctgtctctctcaaaataataaactctcagctgagaggggaaaatgatgaaggcaacttctttcattgaaacacgtttagttgtttttgcattattaaaatggattaaattaattaaatgaatttactgaataatacccagccttcctcttacttaccctgtgtaaggtatggcatatgcacttgccatgcattatgttatttaatcccaacaaatccttaaccaagaaaatcttttacagatggggaaactgaggtcttgagagcttgtgatcagctcacagttacacctgtggtacgtggcagggctgagattcagacccaggtctctttgactgcagacattgagctcgaaaccacggtactgaggatgcttctttagcacaggttgcgtgtgaccgtttccctcccctcatcaacttgaaggttggaaatggcacacagacctggagtgaatcgtgctaggactaacttggtgtactgggcctcagcactgtttaaactctcacgtgggcccctggatgatcatctctgggacctcatcagagtgaggcctttgacacttggctgatggcaatgctggatccaaaggaaaaaaggaatagggggtgtggctcccatcactcttgctgggcaaaacggtgaaggtggggagcccaaggcctccttacttaaagttaaatgaccttgggcaaggaactgaacccttctgtgcctttgtctccttacctgtaaaatgggggtgacggtgacttatggtgaagcttagaaccatgcctgggacacagaaagtgctattgatgtattgctgtgattgttggtatccacagccctgccctcccagccccttctcagatcctttcccagccaggaaaggggatacaccaggtatcccctctgatacaccaggtatcccctttgatacaccaggtatcaaagaacctctgccttcatagtgggggctgcactagccttgctgctataaacctgtgtctgggggagcccttggcactgggatgtctcttcgtggtggccttctcttagcctatagtgatggtgggcagcccaagcccatcgtttcacttattgggtctgacccccaagtgttcttctcccctactctagctctcctgttccgtgagtccctgtaccctgcccatgggcagggctctagtttgaactgatagtcacctgtgtgctgccctgcctttcctgcttggaagcttcattctctagattgggcctcctaagagccaacttctcctaaacccaagcccaagattactgagccattgcagcccgtgagcattccttgtgagtattccctgtgagtgctccagaataaccctcacctgtgacccagtcattcccagccccagcttccactcctgcctgcttccagccccctgagtcctccagctgccagcattgccgagctcaagcatctctgagttaagacagtagtggcagggcattggattccgagttggggtaaactctcgatggcctgctaaggatggatacatgcggtgccagaacttggggagaagttgaacagtcgcacaagctttggtgatgagatttatctttcagctcttacacagtatgagggtcccccttttttgtcagaatgaatgcatttaactgctgacattaggacaaaagaaattccgatcttttttagaacaacgaagccacctgtcttgtttggacagagtacctgaatccaactactgtcacacagttggtgtttgtgccctgaatactgaatggctttttccctctttttattaatggccagtgatagtcctaaatgcatttatgtttaaaaaaaaaaatcttcaatcctgcagcctggagtttggatggaatatatttatcacctatcccagagaataaggttcttgattccccagatttgtcttacaattgtctgtaagacaatgaatgatgcagaactctcctccaaggttgagatcctttgttagagagcagtttcttacgcctgacttgttttatagcatgaacgatcgcatgatccactggcgaggcaacatccataattttgaatgagggagtaaagcttgcctcggtggccctaagcatcgcttctggtgacacacttagaagtccttaatcgcttgctacctagaggcaataaacacacctatctttatgttccattgcctgtgtgtttacctgaaatatgccctgcgtagcaaaatgccagtttcactcctgtgagaaggtccttggctcatgaattgcacggccttcactcacccctattttgccaaaggtggtagtgccttttgtaggcccaagacgtagcttctttggccaggaaaccccttggctatttatgcttcttgtaaaactctggccatttgcttggtttccgagttctaagaaaggagatccatctctggtcatcatgtggagttcagggttcattctggagggcaagatgatgtctccttcactggtgtgtgcctgatgcccaatgcccagcccagggcctagcatacaggggatgttccatgacactcaatgtttcgttgattctgagaggacctgggtcttagaactggttcacccttttgtatccaccctttccagctacattactttagacagtttatataacattgcagtctgttttctttttttttttgtaattttgaattatattttctcttctgaatttgaggattaaagataatgtacatgaaatacccagtgcctagtaccaagagggcactccagaagcggagctgctataactgccgtaaatattgttattccagggaattgctgcctattataccagaaggcactggtctcattcaccctgcagtgtgacctcacctaaaagtccagccggggatggagagggtgcagctgacagagggagctcatgaatggtgggacctggcatggctcagggaaacttttggcataatagaaggcaaaccctcccttctagttcagaaatgtgtaattgctggagatgttagcttgctactgggtaaaatgattttaaagagagaacttctcaacatttaaatcagcctcaattttccatgttccttttcatcaagtcagctctggtttgagaagggatcatatcggcactcaaccctttaaatgattttccttctttgcctttctttttctttctctttggccttggctccttcctttccaaccactcccctcccagaacctcttattttagccaaaaaaaaaaaaaaaaagtttctttccttgctccagaatcacaccacccaccgagcacatcatctggaagtcccctgtccctgagctcacttgctgccaggccggcggcacccagaggctcgaaggccacaggggcacaccgtcttttctcagggttggagagagtagattagacaacatcctcagatgtcccgtctcatggcaggtcactgccactgtgaagggtacggctgtagatgcggggggactgcttgtttcttcaggctacattttttaaaaagagatcataccttttctttggatttaatgaggacagacattttaatcagaggttagtcatttatttttgcaaactattgttttgattcatcatttttgcagataattaaatggttcagttggcacagtatgtctactttattaaaacaggtaattttggggaaaaaaagagatgctgttttttggatcactgcacaagaattgcttttatcttcatctttgagcatagtttctggttattttgccaggaggctctctcgtgttcgggcatttggggtcctttctggtctggaggggcttgccctttgatgattgggatgttagcagatacgccctttgaaacgggagctgaagagtaaattctgtgcagccgccttttaggaacactcttaggttttaattggattgggaaaaagaacctacaagttatgaactttgcagagcagcagttcttatgctaaaaacagattaattgtagccctcgcagtgggtggagtttcaaagtcaattactgcttgtcctattataatttacacacacaggatttgaaaaagtctgccacttagtataaaagtgaaaaggttacgtgtactagtttgagtatacctatgacttttcatttgtaaatgctttagctacatgtatgtgtatgtatgcaacttgcagctgtggagctgtaactacatctgtgagcaagattccttatgaagagtaacctttaaggtctggttccttaaatccgtagtggctcagcatatagtcctttgtctggcagtccagtccacttgtgggcacagtggctggcccctgcagagcctaaggggcactccactcatgagtcatgaactagtaagggaatggcccttcctgggtcaattttttaaaagcgaattgctcacaacatttgctttctttaattttttccatgtttgtgtcctgaatcagttaatttactcattaaaagaatttattttaggtggaccaattaaaactttggaagctaattttttgctgagcagagcagacctctgaaaacacaatttataacatggcttctgcccttccacagagagctgtcttatggtactgtaacctctggtgcttgcagaagtacaaaattgctgttctttgtcctccagctctggagctgagctgccgtgtgggtgggtttctcgagccttcccattgttttagggtgaacaggcaagtctgaaaagtccagcccagcccaggagtggcatgctgtatttgtttgcttgcgtaaactccatagtttaattttttttaataggaagctgctatgtagttcggatatttaaacagttattaaccgaatgacaattaacagattgcatagacagattttcttttgaaaacctctgaaattgagtacagtttgcaaaactatcacggcatagtaatgacaatgaattttgatttcccggaactgatattagactccttattaaactatgtgcatctgcttttaatttactccaaataattggaaaatgcaatgaagctttccaattaaagcacggctttatgctgtttaataatacccccataatattatagcttatgaagtgacaggtgagttggtgtatgaataaaacataaaggcagcaataagggacagaaaaccggagacagttgtggggattttaaatgctggatgtaatttgcatatattaatctcttcttttcagccttatcaggcgttcttcagtatttgaagttaaaatagcgttgacaggcgggagtacgcttagttttttcaaggatttattacttgtataatttctgatctttaataagcagatatgactgatcctcatagttctatagaaatcagttaattgttccagatggcgtgtactgattatgcaaaattacttttcacaccattttttttgtgatggagtttggagtaaaattaaattttttatagccttcttatcatgctgttttacagtggtttttccacagaagttgaatttaatctactatattacattgaccaacacagttattctaatgtagcattttgtgatttgacagagaataatagaacacattgctcattgttcattactgtgtccctaataaaaaggaactcctgtgtatagaacatagctgttatttatgaagaatgcctaattcatacagttaaaaatgcaaaattgtattatgaagtagttccttttggggagagaatatctggaaaaagcaaatggaaataggcttgttgctgcagattctacatgctaagggaggagccttcttttaatgaccagcgtgtttaaattgtgctactttctcctttgaagaaggaaaaacccagataatcttattctattaacagaggtgtcactggttgacttgtcttgatttacataatcccaaaagtctttcataattgaatagcatttataaaaggtggttacactttagtgtaaagtatccaaaaaaaaaaagtctaaaggtgtcaatgataattcgtctctaacattttccaaagtgtctgtttatcaccaaggcccttgtgttggtgtcggatccaagtccaggtggtgtgtacccctaggtaacattcatgtaggctgatcctcgtccaggttctcagataacactctctctatggctcagctgctagtgggatatgaagtactcagccgactcactccaaaatgggactgagggactgtcaccttgatgcaggagtggatgcagtttccgtcctttgggaggacctcttcccagagcccagtggggtgggggtaggggtagagagctctctgttgcatcagaaatcctgtttggatatgcggtattttaaatatagcagtaaatccatagaaaaatatttctctgtatatagtctgacctgtttacaaaagagcccatcacatattaagtcttatcaggacttgtgtagacttgggacttatctttctattttaagtagagttgaatcccgtgtatgatactcgatcgctgcaaggtccatctgcttgctcctgatagttctggtccgcctcatcagccattccacaggcttgagaacacgtccttgtttgaacagacttgaggaggatttggatctgtttaaagggttcgattcccttagccctgggggaatcggacttttttttttattttaatacacttccaccagcaacactgattgctcttcatacagggggccctggagtggaagcaggcctgcgttgatgcctctgagcaggctctggagaaacaaagacaagccacagaaagtggcagacctgggagctctgagagctctgggcagggagctcacagggtccgctgggggtgggggcgctaggcagggagctcgcagggtctgctgggggtgggggcgctgggcgcagggtgagagttgctctgtgggagtctggggtctccacagggacctgaaacacagattctgttagaaacccagatgttagcactgccagtaccacacagattgtaccatgtaccttgtactatattctggtcttcagaatatttttggttaaactcttattttgtatctactctggtcttgaaggacatttcacagtaagcctcgaatagtactagaatgactaattaaaccgaacatgaagaaatgtgactcagagcctagagcacgctcacacgtacagtaccaactcaattctgtattcactttacctccagaacttcagaaacgtgaaacctttcacataccctcttctgtaaactcaaaatgtatttttgtgaaaatgaaaattatatgaaaaagagaatgcataaatcagagatgattaaaaatatttgttctaatgcagtaataatttggtagtaatgctttcatcagtatagcttaaggctacattaagtggacagactttatatggattctctaattttaatcttcaaaatgctatctaatgtctcattaagacttgcatataatgtatcttaagtacagtcattaaatatagtttagggagatttatgttcagatattgcttaaagatgttttaataggcccatttactctgatgatattaatgagctcttaatacagactaagcttctaaaactagtggtaaagactcccagcctgaacacaacaacttggaattaatgcctggtttggacagatgcctgagggtgagtcctgcagacactcgagggtcagcgcgagccccttgctggatggagccttgtttcagaaaggggcctcctgtaacgggctctggctgctgactccagagcacccattcttcggccagcctgagtactgtcttttttctcccccaaactgtgcacaggacatgtgctaactaggccgaagtacctctccaaggttatttgagaggcgctgatagccttggcggtggcactggggcctgtgaggggttaaaggaggctgttgctgaacttcccgtggaagcatctgccaggtaaggtgtgcacagtctggcatcgttacgtgaaacagcttccctctgccacgagtgaactgtaaaaggtcacatgggtgtgctttcatctttcaggcattcatcctagctgaaatacatgtaataaagtagtcctgctaattcaacatcagaaagaaaaaaaaagcccaacaggaatctccgtgagcccctcacacgcgtgaaacagttgttctccaggccccacttctaaacgtgtagcaaaaaaaatctgttttggtatttccctctttcagagaaatattgaaaagtacattttttttttgtttcaattattttaagggaggaaaaaaaagaaccagtgagttcagagacttttctaattactaaattggtttgttataaaaagataatagcaaatttcttcttttcataattggacatttcttccctgtaggctaatgcaggcacagcccgtgcatgcacaataagttatgcttttgaaagccataactagctaataacagctacagtgtcatcagagagtaatggtgtgctgattagcataattaatgacaaatggtggtgcggaattggtggattggtttagcggatgatgaatgcggcgaggcctgggctgaggcctgccaactaggcctcgctggctgtcagcccttctgttctcccgatgcagccctcattagtcacgatgggaggtgccagtttgtattccgtttggagcacagaaaacttaataatccaagcaaatgtggctatccccttttcctctgtatttactcacaaaaccctctcactcattcccattgtggctgaaccattaagacacagctatttccagattcctctgcgaggcttgaaggcgaaacaaaagggagcataatagagagaggcacggatcccagagctttcatctgaccatcaatgaattactctcactaggaagacttctgtttggtgaaccctgtttatctgtgtactttataaggggaaaagagatgaactcagtaagcgatacattctgtcctaaaataagactagcatatttatctttgacttgattaatcagacctaatttgcattcgcaaatgagactgataaaaatggatttaccttttaacctttagaggaggaaaggtatttctctgcaagatttctggggctatcgtttcttaaccgataagaagccactcctttatcaataaagatgaaaatccgcaatttgcattagtgaatgggactgattattatatagttaattagcatctggaaatgaggattatcttaattacaaagcacaatttccctaatagctacaaaactaagtttgatccatgtggaaattggtaacattattatgtaattagtgataacattaatagtgtagaatatttagatgtaatttgcatatgcaaatgtgatttacctgagccaaacaagtggaccattaatgattagagcatgatgtagctgactgaaagttctagatagctgaatggtacctattatgcagaataactaaattatatagtggtagagtcagcaaggaccttttatatttaggtggtcagggtggattttgctttaagaattagtagctgctgggtttcataatggagctaactgcttggagaaatagctagcccataatcatctccttgactttgattttttcatgcttccctatatcccttgaatctgagatgtactttccctatgtattttaacaattctgaattttggatctgtcttacaattgatgtgtacttttaaagcagtaacacacataaagaataatggtgcagtttacagttcttcaggggagaatcagacctttctgaattttatccgcagggccctagaggctcctcccatcagaaatggttctttgtatcttctggggttctatctaacttcctccctcaggctgacatatgcttcccaaagccatgtactcatggtggggtggattttagagtagacatggatgaccttttgaaaactgtcattcataatagcttatcagtggatatcattgttcagaatgggactaaagtcagtgtattgatcagtctttgcttggttatcatgccagtaacaaacacccctccagatcacaatggcttacagtttcactgttttgtaaaatggaacttggaaatgtaaattggaacttgagtgacatatatcaccatgtcactcaagttccaatttggtgaccgtggattggctggaaccctgctccttgtgtctttgcactctgggacccaggctgaaagagcagctcccaactgtaacttgctatttttatagtagagggaagagtgagacctggaagaaacaaccagtggctcttaaagcttctggccatggtggcaaggcctacagccggccaacatgagttgggcagaagtgtatcctcttcccccaatgtgcctttcacacggcagtgggcagatggtcatactgttacagggaagtgggaacacatactcgggaatggtgacactacccactggaggaagctattttgagtttaaaatgtgagtgtgtgctgtaaaaatataaagtcagtaattatactggaaaaaaataagtgaatctgagacatcaggcaccttcctagagtctagaaaacactggtggccgataatgtctgtagcttttccctgtgcagaattttatcttcaacccatcaagagtttgtgtcctcctggggtgtttgggagagctcagggattttgatgggtgttcagcacagtggaagtagcactactttctggggtttaagccccattttgaccatttccaaacatgggaccgtcattcctttctctggaactcagtttgcctagctgcaaaatgaagctgttggacagggtggacctcctgtccctctatccttccaccaatcattgagggccaggcaccctgcaggggctagaacaggtgccttgagaggttttgcctcagggtaggagggactgaggttccaactgagcatgacccacccgtcatttccggtaagagcctgataaaaagtttgttcctagaccaaacagttcattgatatttcttcctcttttaaaaaataaaaaaacagacacaaagcttttacttacctgaatgataaaagttacatgttcattgtagaaaagttacaaaatatatgaaaacattggaaagaaaatatcacaaccccattacccagagaaacagtatttcagtgtatgtccttttaacactttttctatgccatatgtttacacttaaaagtgtatgtctacctaattgtccattctgggttctttttaagtcagatttattgaaatatatttacatgtaataaaatccaggctttttatgtgcacatttcagtgacttttgaccaatgtcaaactacatgatagccgcctccagaaacaagatacagaatatagccaggagtcccataagttcacttgcctccatttccggcccttccctccccatcgccagtccctggcagtcacttgcctgcccagtgctatcatatacatggactcatacaatatgtagctttgtgtgtctctcagcataatatttttgagagtcttccatgttattgcatgtatcaggaatttgttcctttccaacactccaggtgtctattctgctttgagacctgttcatgtacctcgttccttgtcattaggtcaggtggtcgtcaggctgggattaatggttgtatcatcctccctcttatggatacaatgtactttacctagccagtcctcagtggctgagtttttacattatcttcatttctaaaagttatacttcggtgaatgttcctttaaataaatatataaacacatttttaattattttgacatataatgacaaattgtcccccgtaatggttgaatttgtttacacttctgcatgtatgaaagaggtttgtttggtttggttttccacacaagacttgctaactggtaattttttttttttaatttttatcaattggaaggtgaaggggtattttattgttaatttacatttctttgattactgctaaggttgcctgtgttgagccacttgtgttactcgagacctttgcctgtctgtccgcagcatctcttccattgcagtcttaattttgtttgtggagttgcgggagctcctcttgcaacaaggccttcttttgctctcacattactaccgcttgtttccagtttctgctttgtactttcatttcatgtttcctttatgttttgtgtctttgccatcacgttttagaaaagccttctcggttttctggtatattctagtaccttcattttttttaacatttaaatctaaagttctgctgtgatttgttttgatgtgtgacaagataagaatctatgtttttccaaattatttattattgtcccagcatcacttgttaaataatcttcttttaaccaactcatttggaaaacaatcctataataacctcttactgtgatgtattttgtggcctgtgttgtgttccattgagttgaatgcatattccaatgggagggtcacgcttttaataattataaatgtatgtattttaatttcttatcttactattctttgtagttatttttcagaatgttccaggtaataataacttttttacccagtagaaatttagaatcactttaagttccaaggaaaatactttgaggattttgattgaaaaaaacattgaagttataagtcaatttggggagagtggtcatttagaaaaatatccaatctttccttccagagatataactctctattcaaatgtctttgtatattattcagtaacatattatagttttctttgctttctgtttatataattcctaagttttaaattttgttgcattacccattatgttggttttggtttttgttttgtttctttttgagacagggtctcactctgtcacccaggctggagtacagtggtgcgatctcggctcactgcaacctccgcctcccgggttcaagcaattctgcctcagcctccaaagtagctggaactacaggcacccaccgccacacctggctaatttttgtatttttagtagagacagggtttcaccatgttggccaggctggtcttgaactcctagcctcaagtgatcctccccctcggcctcccaacgtgctgggattacaggcgtgagccaccgcacccagcctgcattgcccattatgttttcattggtgattaaatatttaatttaatattgttgggtctttttttttcttttttagagatgggggttctcactgtgttggccagggtggtctcaaactcctggcctcaaacagtcctcccacctcagcctctcaaagtgctgggattacaggcttctgccactccacctggccctgttgttttttttaatcttcatttggtaactggccacctctctgtatgcttgttatttccaatagcctccagtttatttactgggattttcttggaagacaacatcatctgcaaatacagatcattttgtctctttgataacatttatacaccattggtttttcttgctttgtatttttggctaaaacattgaaagcagtggcagtagttttcattcttacctggttcctgactttaatgggaatgcttctagtgtcccatggttaagtctgatatagatttgggggaatttggaggagagagggcttgattgtattaaaggacccattctctattcctattttccaaagattttttttttaataaattcaggcactaatttgagtttcatataaaaaaatttggaatattttaatgtagtataatattttttctcacttattgacagatacagattattttgttttgatgatttagcatttagaaagttattgttatatttctgaaatcaatctttattatggtgcattcttctttaaatatagtactagatttgagccactgctatttaagttaggatttgggcatttatataagtaagattaggctttttgcttatcaaaatgtaatttttgtgtgatctaagtttttttcaaatataaaaatatttctaaaatatttaaatggctgttcattttggggaaaaaagaacaccaaaaaaaaaaaaaaaaaatcctgtctgaactatgtggacctggaagctaggggcattttgaggagatggacaactatttcagtttctttcagcattagtgatttttttcaggctttctactttttcttgagccagttttatcatgtgtatttttttaaagaaaatatagcaatttcacctaaatttcatctaaattttaaagtttattggtacaaaattttacttaagagtttgtatttatcttaaaattaatatacctatagtcatatatatcctgatgttatttttctctctctttttcttggttgatttatttgctttatttgtctttccaaataactgctttttaaatttataaagccattagacttttgctttatactatttaataaatttttatctgtattagttcttttttttaactttcttttttttttttttttttcctttgagacaatgtctcactctgttgtccaggctggagtgcaatggtgccatcttggctcactgcaaccgccgcctcccaggttcaagtgattctcctgcctcaacctcctgagtagctaggactacaggtgcgcaccactatgcctggctaatttttgtatttttagtagagatggggtttcaccatgttggccaggctggtctccaactcctgacctcaggtgacccacctgcctcggcctcccaaagggctaggattacaggcatgaaccacactgcccccagccacctttttttttttttttaactttctatttattttagcttttttaatagcttcccttgagtggttccctcatttgttttctgtccttttttgatttttaataaaagtgtttagggttatataaatattcttgtatattgctttggtggcattctgtagctttcatatataatatttatttataaatacataatttcagttttgattatccctttgactcaagtgttagaaaagacatttctaagtaatttttgaaaccttaatttctacttttattatgtaattatccgagaatatgacctctataattttttgttttttcaagtgtatttagtctttgcagtctaatagatatatcagttttactaaatgctccgttgatacttgaaaacacatcttctctctgtcacagtgtttgagatacactcccaccatcaacgttttttgatcaagtaggatggatgggtatgtatacccccatatagatatatacattcattcattcaatttgaccaaacaatggtagcttttgttttgcacagttcttctcatgtcagtatcattttgatcattggttttattttgtatgttcctatgcagtgttattgaggccatgaaggtttatgacggttaaaggtctattatgtattttactcttcatcgaaatagaattccccttttgtcgcatctcgcatttttggccataagttccatggtgctcctgtcccttgtggccctggctctgagtgctgcccctcctcctccctctgctctggccaggtgaggcttctcctccaggggttttccacctttgctgtggttgtctcttccaccaaagagagccctcctgttccccaccacatccctgccagcctctgacctgtctgtgtctccagctcttcccagaagccctccctggcagctcctgtcctcctctgctggatcctgtgagcaccacagcctcctgtacaccctgagctatgcctctcaaggccctccaccagctcatcccctgctgtgggcacaagccctgctttcagagtttccctgcccagggaatgaatgccccttgagagaccacacatatgctgcaagtccagccctgctcagagccgttctttgccaaataatcaccttgttattaaagagctgattgttctactagactcttctattcttatggttcaccatgaaagaccagttaattcactttttaaaaattacttcaagagccttgtgtttggccgttttgtgtttctataaagaaatacctgagactgggtaattcataaagaaaagaggtttaattgactcacggttctgcagactatacaggaagctccagtatctgctcctggtgagggcctcaggaagcttccgatcatggtggaaggcaaaggggaagccgatgtatcacatggcaagagcgggagcaagagaaagagaagggggaggtcccaggccctttcaaacaaccagatctcggtgaattaatggggcaagaactcacttattaccaaggggatggtgctgaaccattcatgagggatctgccccctgatccagtcacctcccaccaggctccccgcctccaacattgggaatcacatgtcaacgtgaaatttggaggggacaaactgccaaaccatatcaagcctcatcccagaactttgatcattggaagtgcttatttgaaatcttcccatcttccctgatgatactccaggggcccacaccagagcgctaggcagcgtggcatagaaggaagggcaggggttttagagactggctgcctccctggctggacatgatcccataacttgccaatgctcccgtcagctgcccagttccttgcacctgtctctcaaggggcattcgttcactgggcagttactgaggaaactcccatgtgcccagccctggggcctggactggcagagagccccgggcagtgagtgggagctcagagcacacggggcccccacacaccaactggatgcgacctgccaccggtacaaatacaacctgcagaagtcggatgtgctggtccctctgttgagaaggctcggtggccgcaagcacgtattgcagtccacagaaccatcctggcagatggcaacggctgtagagaagacccgcaggccctttcccttgcaggtttgctgtctgacagacaggtctggcctccctggcttcctgtcattaatgtggtttcagatgagagtgaccccccacagcacctccttgctaaggctcatttccagaggaaggcagagagtcattcttcatggttaagaataaggacagcctttaatttcagcaaatttagccacttcctttctgcccagaggcataggaatatttctgaacctggacagggctggcctgggcccagtatgttctgagtcccatgggcaggtatgcttaggctggggtgactgttacatcattacctgcagcgagagactggcttttttcctctcctgactggccttaccatggaaaagcaagtgactttttgtgtctgtttggtttcaggaataataatcaatttttattgagctaagtcaccttcatatataaactcatttaatccttgaaaccactccacttcccattttacaaataaggaaccgagattcagagaggttaagtgactttcccaacatcacacagcaaatcaaggcagtggcccatgggtgccttcattgtgcctcctacggaattccgtagtaggctttctcactcctccactcttagttttaagttgctgtctcatttcctaggctgagcactccatgagagatgcccttggcctcctcacatctaacatcagagttaaccgtgagagctctgcagtcaagttcatgtcgcagtctggtctcgcctgtgcccaaagcctgggagggcccatcaggtgatgagtcctgctgctccctgcactgtgcagagcagagcccctggccctccctgggaaggaaggtctggctcccaggtgggcggtgggcaagctccacttcctctcattagtcagcctaatggatggccggctgagcttccagatctgtccggggactagtggactcttaccgcctgctcccagagcagcctgggaagctagcccccattggggtgacacagatggcaagcccaaatgacaaagtaaactccaatatgtcttggagacattgtcagcctgcagcttatttgtcatgtcacagcagccttgtggaccagggatgtactccctccccggccctgctccatccccatgtgaggattatttacaggaaactgcatttgatagggctggtggggagggcatagagatggaggggtgccagaacagatgttggtcattttctcacgtttgggaaattaataacactcacttacctagcatttatagagtgcttcacccaaactctcttcaagtctcatagcaacccaaagaggtgtcgatataattaatcccagttaatagatgcagaaaccaaggcatagagagctcagtcaacttgcccaatcacacagctaatgagagctgggattccggctcaggctggtgcagcggaggctgaaagggcacttgctgcctgctcagggctgggttttgggaggcagatcaagcaggaggaatgacaccctgtatcccagggatgtccttcagccctgcaggtgcagaccagctgtgccacccagcccaaaaggggacacattaagggagggaagcggcactgtttggcctttctcccatggtgactgggctctgcggtgagtggctgtgtttggggctgtgctggacagcaaggtcacgtactccaccctaggtggcatctctgcatcaccagaagagcaggggtcagaggaggaggaagaggcttggcaggctgagtattcccagccttgcctttcacaccaccactgccatagggagtcaggcccttcaccatctgggcctcagcgtctttgactgtagaaacaaaaatggaggcatgaaaagcctcattcaagaattgcagtgaagatgaaatgaaataaagcttgcaaaatggccctgcccacggtaggtgctcaccactgtagagaatggctgggaagcagtgcagaggggactctctcaaaggcctaggccttttgctgcacctccaggtggaggagggtgtcagggacaggtcaggggtacttagtagagggtctcgagcaaatgatcccaagagctgcagcccatccaggctctgagcaggaaccctggagaccagagacagcaaggctctgtgagaactggattcaagcccaggggaatggtcaaggctgcatctccctatccccagctcccaaagcagtaggagttcaaacccaccgggacaggggggccaaaaagctggacagagggatgaggcactgcaggaactccgtggtgggacacgaccctcccactaccttccagaagcaggaagagaggaggcacaagggtcctgggtgggtgcccgggactcatgtcatctggagggggtttatttatctttctgatttagctttaaagatgcccctgaacccacagcctctggtcacaggtaagcaatgaaaagccaggtggaatatgaagagcagattaggttagccgtgtgactgatcccaagctgtttgccgagtctctgtgtaaatttcatgcaggttgtctgattgaggacacctggaatgccgcgggcttggtggttatgaaagtcccactgtttcattccttagccccgctcaccagttatgtgcaagttgaaccgtaccatcaaccccattcccagcagctcctgtgcatgtcggaggcaggggatccttgtgtcaggcaccagcagatgcacctactttttccctaggagatgaaaaaaggaagaatgtgagtccgtgccttcagctcatgcgtgtgctcacgtgcaggcacgcgcaaccagggctcccagggagaatgtgcattttaaacaatagacccagcctaattcctggtgttcacgtggaggccattcagccagccctgagccccaactacttgctggtcattctacttgaatctgggacacaaaaggtaaagaagacatggccctgccttggagcctggtaggctttccctcctcagctcggaccagcactggggactcagctccagacgtgtgcagaccctgcgggcccacggggttgcctgggagctggggaaatgtgttccctgttagagcgctgtccatttggtgatttgggggcagccggtgcaacacattcagcagggcctcaggtcgtttggccagactggaaattggttctatcccaaatgttgctggaaataacaaggcagctgttcagcctctctgttctcagttagtaagtgagaaaagtgtgtgaacccggcagaggaaagaaagagttgtcagagcccatttcccccatgcctttgatcttgctgacctggatgtttgggtgttgggggtgggggtgatttgggagtttgggtgagttttttggctgaagtaattgggatgtcttaggaagcagggaaggaagggaagttcaagggtaattgctaactgatgccagaaagaaaaaataaatgaaatgcttaggcacttcatggccctttattttccagccatttctgcaaattgcagtctagttctttctcagaaataagtgacctgctaatacagggtggggaatagtggctgtaggacaatgaggtttaatttttaaaagctctggactcaagtcccagctctgcccccgagacaagcccctcaccttctttgagcttcaagtcagtcttctatcaagaggggctgaaaatgcctgcctcccgggattgtggtaaagactaattaagagaagacttgctgaaagtgctttgtcagctgtgaaatatgtgagaaagataaaatccctatttcttcaagttcagcgggtttttagtgagcatctatttttgccagaaaaccccacagacgtgccacctccccgtgagcatccccacccaccccagtgcattgtcaaggacacatgaacttgtcaactgggtgagcaagcaggggaggggtgaaaggtccagctgcaagcagggaagcagctgagcacccggagcagaccagggcctggctgggcagaagggactcccagagctcaggagtgttgctgtttgccccttctcccttctcaagtatggagttttgttttcatacctgaggttggaggtcctagtgacttctttctgcctgtgtgggctgtagaggaatccgttgccaacagcagtggcctgtgtatcaccggctgcttcctggaagaggtgttcattacacaggctcagcctctgcttgcccatgaggctcttgcggtttctttcttctcactatgccccttctcacatgtgcataactcgtacatggacacaatctcacatgcgttacgtggcacatgcatacactcacgtgtggcacactctcacgtgtacatacataccgtgtgcatggtcttgcatgtgacacacagcctcacatgcatatgtgcacacatgacacgtgtgcatgctcacatgtgtgcacacatgacatatacacaggtggcctcccctcctctctggatcatcaaggataccatccagattaccttccagggctgggacaagggctcaccaggccccaacagggcaaaagacaatgagagaggcaagatggaagtctggtgtcccatcagggaaagtctaagtgagaaacagacgcggtaaagcagagagcaccgggagacaggagaggcatggacctcagagtcagtgccgccaccacctgctagcacctccctttggtcccttcagcattttaaaacctgctttctgtactgagaaataggctttcttcttttattttcaaacttcaaagatcagttttgaaataaagttttttctgatgaaattccaaaggttttacacatgtgtgaaaggagaagtttggctgttaaaatgtgttcaccctgccccttgctgccctgacccaccagggtcccaccgtgcctccactttgttctcctaaatgctgcaccagctcacaaccaccaatagtgtgttgttccagcctctttccttcatccccctaattcatttgtgttcagctagagcctagtggggcagaattgatttttttgttaatgggaagaaatgtttcctgtgtaggcattgtttaccactctgcagctaatcccattgagcctcgggctcagtaagcgggacacccaggtggcctggggctgggcgagtagaaaggtggcccctggtcttagccaaaggagtgccctgttcaagcatcaggatacatttgcagtggccaggggtatggaccttgcattttttaacccctgcatggctttagccccataaagacccaactaaataagtgagatggaagtgaatgttttcctcttctttttcattttacttttgttaagcactgcataatgtgcatgccacgtaatacagtgaatagccttctggtaggggtcgatgaccataattgagtttttttttttttaaccagccaggaaaatgcttccttaatcaatgttctttaaatgctttgacacatggtaacaacacaccacagagatgcacgtgccgctctccaccagactccactgataggaatactgggcagccctttcttcccttccctcctgtgagcctgtgggtgcgcagggcagccactccggggatgagcgagcatgcaccatgatggcgattccaggaaggatcttgaaccacgtcctggcagggctacctgggccaaaaccctatttctaggccccttaaaggtgagcgggcttcagctctctccccagtaagacccacaactcccagtaagaccctgcgagctggctagaggtgaatttattttattttattttattttttattttattttattttattttattttagatggagtcttgttctgtcgcccaggctggagtgcagtggcgtgatctcagctccctgccacctccgcctcccgggttcaagtgattctcctgcctcagcctcccgagtagatgggacaacaggcacgtgccaccacgcccagctaatttttgtatttttagtagagacggggtttcaccatgttggccaggatggtctcgatcgatttacctcgtgatccacccacctcggcctcccaaagtgctgggattacaggtgtgagccaccgtgcctggcccttattttatttattttgagacagggtctttctctgttgcccaggttggagtgcagtggcaagatcatcactcactgcagcctcgacttcccaggctcaggtgatcctcccaccccagcctcctgagaaactggaaccacaggcgtgtgccaccatgcccagctgatttttttgatattttatagagatggggtcttgccatgttgcctaggctggccttgaactcctgggctcaagtgatccagctgcctcagcctcccaatgtgctggaattgcaggcgtgcaaaccactaagcctgactgaagtgggtatttgagcctctaatgctccctgttacagttttgctgtcgtggtggttctaagacaataaactttgataggtcgttttctttctttctttctttttttttttttttttttgagacggagtcttgctcttttgcccaggctggaatgcaatggtgtgatatcggctcactgcaaactccacctcccagattcaagcagttttcctgccacagcctcccaagtagctgggatcacaggtacccgccaccatgcccagctaattttgtatttttagtagagacggggtttcaccatgttggacctggctggtctcaaactcctgaccttaggtgatccgcccaccttggccttccaaagtgctgggattgcaggcatgagccaccacgccccgcctgataggttatcttgaacatctcttcccaatacagtaattagaccttaaatgtttttgttggatacttacctccaagatattcccaaatctccaaatttaaaaatagctctttcgcacacgatttctcccacagaatgtagtaatgtagatatgaaacattcaggtgaacttgttagaactaatggttctataaataaaaactgacatcattcataaagttatttaaataaattttgtcactaaaataaatttatatgttacatcattgctaataatgattttaactgtgagttttctttttgtaaaaaagaattgagccaagccccagggtttttctaacaagctgacgggatacttggctggggttctcatcctgcccctccctgcttccagctcagatactcggaatatggttgaagcctgactgaatcataaagactgcctgagagtgggagaggaaaggatcagttactctttggccaccttgaacgcgcagcttccttttcctcctgggatatggggtctgaggcatctccttcctagaggccatgtccatctgcattgcagggtgttctgtgcaagagccatgctcccctcgagtttcttcagctgatctagtaattacttcaccagcagcaggctgctgatagcgcccctgtttaacttcagtttataaaagaaaagaaaaagtaagcgtcttacaattctggaacctcctttcctcttgggagtctacgtatgggccccggcttcgtcctgaagcagtgtcaagagtcctgtgccgtctgctcatgccctcaccccacgagtttaaccagatcttcagctctcaccagagtttcttccacagtcagaagcccttgcactaggctcgcaaaccctttctcatttccacatcgcatgtgtggcaggctcattcctcccagagtagagctgagctgcgccctcagcccaccctcccctttttaatcgatgtcagctccttcccttacccacactgcggccaagtctctcccctttcttagacctttgggatcccttcttccctccatcaccaacattagcagttggctcttgggtgggatcagttttttaaaataaagagacgaagtgtcacttcaagggaggtactgcttttgcaggagaaaagtggggcgcctctcagccaggctgaaatctgggagctgcatctgactggctcgctcactggcccaactccccactgaggcacgcctgctccaggaaccccagtgtgtgccaagttcagtgacatgtttatgtcatgaccttcaagacttccaccaatcctagccaccatgaatgttatttttttaaattattttattatattttagatttgggggtacctgtatgttgtgtacgggtagagattgggcttctagtgtacccatcggatgttggagtctcaggtcccagagagtcagatttcaggtgtgaggatgcggttgccagtacttccattttctccgcattttgtcacacctcagacaacacaggttgagactgaatgaaaatagggacgcgtcgcctgtcgttctactgagggagaacgggtggtatgtgtttgggattttacaggcagaacatttaaaggccaccttgtgttttctgaaccttaggcacaaatgaaatcacggcttggtgcttgtccaatagcctcgctggagtcaagctgagagcccctctccaccaaaaccagataataaaagcgagcaaaaagcttgtgctttcaaagtatgtctggcaaaagacgatttggggactttttcacaataaagactgagcagaaagcgaatagccattctcaccatctccttgagctcctggaccccaccgtcagtagccctgcactctccctcaccacggggcaaccttgacttttgattgtcaggtccctgccaggtctctgctcaaacggtttttccactgacccaataaatgattatgtaacagtcaggagacccctattcagacaacacctggttctgttactcgcccgccaggtcacactgagcaagcgggtaaacgtctctgtgcccaggctcagcctcaccaggcccaggatagagaccaggacaaatgagataatgggtgtgaaacccctaggaaccctgtcaggcaccacaccacacgtttgtgtgtgtctgagaaacctattatttctaggctgttcgggggcctctgggctgctccttttggggggctttctgacccctggccggagccagcatcctcactcaacactggctcttaactttgcctgcctgctgggtttctcttttccctgagggtctgctcttttggattcacgtgatattcttcttcccctggggctttagggaaagtatttttaagaacaggcgccgggtctcctgttgggccttgcgtttcatggtggttccccctcattccagcctgcagtttgtcccgcctggttgcgacagcagccctggcttattggtatctttctaggctgttaggttccattgaaatgtgtccttcttatactttactgtgaccagagtcccttgaaaaaattcagggcagattttcaaatggctggaagtcattactcagggaagcacagaaaggttcaaggaaggaaatcaagaatccagcacaagttagaaatactgtgttccttagcttcaaaataggaagagctcactttgagttaggtagggagagagaccgaaaaaacaccctctgtctggaatccagaaaaggcattcacaaggcatctgaatttattctctttctttctattactgaaagtcaataccttaaaaaccctgagtgctgagaaaactcactaagcctatagattcagatgaccaaggatctctgagggttcctttcatcctgcaagttttaagggctcagatcacagcaggtctggacctaagagaacccccaggttgggttacatactaaggaaaaagtaatcagttggcaagtaggttacctggctgtgctttggcactggtatttcttgatgccttgtcgtaaactcagagtgtcacgagcctggcctgctgagtggtgccagtgcaggcctccccttgactgacacatggctcccttgcctctctgagtcataaaacaggccaattgtgtttttcttaggggactgtgacccatggggacagtctagcatggtgcttggcacaaagtccaaagccgtctccaagacgcagctgcatcactgcctgcccctagcatggttagtccttccgggtaatggagagtcctgttgcttcagaaaggcttcacagaactgtgcctgtgagaccacgagaccctcaccccagcagcacgcgggcacgcagcccacagcagcatttctcatggtgccattgtgtctgaggtcccagagccaaagcctcgggaggcttggggctaaggatgtgtattttcgcacgcagcccaggtgactgtggcatgcctgcgggtttgagagttttggagcagaaggatgcctcttctggatgtggggcagcttggagtgcgcagttgttatagcgctcacaggggccgcgctcacctgcacccatccttgcctgccccgctcacttggacctgccactctcccacaggggccgcttgtctcacagtcagaatcgccagcttcagcccacccatctcgagggagagaaagggctccggggctcagtaatggttttcacaggcgggtttcatgagtggagccgctcttgttgggaagcagcttcccctgcgatttggggcatgtgctttggactttgaatttgaggctcccatttgaaaccacttttccccagccgtggcctctgcagtgttctataactcagtcttagtggctctagaggatgtctgcctatcttcttgagggggcccctaggggtccccaaatcagttgactgtgtgctccctggccgctgggcctgcaacactctgcccagctgctcttgctggctgtagttctgctcagacctcctcggcagggtggacaaggctccgtcaccatgcaggtgaccagcactcactgcacaatgaggcaactttgctgccgccttgctggacacattcctgggaaggtcacaggcactcgggcctcagtgtctccatctgaaaaaggaaagcattccacaacataagtcgccaaactaaacttctggctcagatcttcccacattctttgatttgtttatcctcagaattctaacgtctctgcttcagctcacatccagctgtgctcttggtcatgccaggagatgcccccagatgctctgcttctgctgcacttcccgtctattgcagaagcatctgctcggactccatttctttctctatcccctgtgtagagatgtggagccaggagcagccaagcagccaacggcaggtcagaggggtgggcatcgcctctccctgaccggggtctggagaagggagggccaaagggtggatttaggcctcagcatgttggggagatgatgctgggggtggtagcggccagtggaggtggggaggagggcaagttccagagtgatggccagatggaatgagaagactccctgggttcaaccctggctccacctctgctggcaggtgctcctggggaggtgtcttaactgctctttgcctgagtggcctctgtaaaataggaataataataataatatacacacatccctcatggggttgccttgaggattaaatcagtcaatacacagaaagccccaagactacagcctggcgcagagcaagcatttgaacaacgttttgagtcaccaccaccaccctttttgcgatttacaggactggtgactgttatgaggtctggggacaggtccctgttcttcccaggccttgggaccagacatccaggtgggtggcagagctattcacagggatcaggaaaacagaaactggaacctcataaggaagagaagtccacccattcttcattttccgtggaggccaggagtgatgccttgatccagttccattgtccccacctgggcctgtgcatggccgtcagcacccccacaaccgccgaaggctggccctggtggcttctacggggattgctctctgttgtctttgaatcacgctgctggagaggagcttgcgtagattcccaagtttgtaattaaaacaatcgagaaacaattttcactatatataaaaaaaaaaagagctaaacagaaagtctcttttaagcagatgttgtgctgtgagccatgtagaaaaattattttatcatcaacccagctcgcctatctcaaggcttgaaagaaactaagggaacatcttttctactagcccagcgttttttagctcctaatatcatttcacatttaaaggtgacagcaatatctttaacgtttttctattggattaataacatttaatgttcaaagcaataaagcgaaatgttttcgtgagggtgctttatatcactagtggaaaatccaagtttaaaaaaaaagaccacacacacaaagtaatagacgtggagagccgtaaaccgagaaagggaacccaggcgtggaggtgggagcctgggcgtggaggtgggctcccggggtgggtgggctggtgggtgtccaaggccctgagccccgactggctggccagcgctgggagggggtcggtgcccgtgggggttgagagcatgggggccctcgcccacccgccagccattcatctccacccagcagcggaatatgacaatgttagcatttttcatttccctgacgttaccattaataaagcaatgatccaaaagaggcttcgctgagtctgtgctttatgctcccatcactcacgactagataatttcacacaggatcgttttaaaattaaatgacgataaaaacgctctgctgttctgtgttcaccagttcatagaagtctatcaagtcattaatgtgtcatgacaaactgctcgatagatacaagagtaattaattatttgaataaataacaagttgaacttggagctttgaaccacaatgacatacacatcccattaggggcgtcttggagcctccacagggcactggtacgaagagttaaaatgcaggccagggtattggaagtgatgaaaaccaatttcgtaaacacagggtaatattttacggggagatagccgaagtgtcacatttccgtgcccgcatgaggttcagtgttaaaagttccctggcagcggccattccaagacaccatttgatcagagatgatttcagagaacaattatacagattttcataatcaccattaatctctgcatatttttcaagataattacagcaattattatttagatttctcttttatatgcccattgtagaaaggaacaagtgcttattataccggatagttcagagaaccttggatgagaattctttgtcatctctgcgctcgttatttcaactcatgttgcctctgaaagttcatcagctgcagaaattagaataccagcaggccctgttattaaatcttaaggttgagctgagaccatggttagagtggctggctgaattgttcatttgtgggactgctgagctcaggtgggattactgtcaggtggcaggagatgcccctgacaggtacaggcagagatgggtggccgcctcacgcccatttcccctgacaggcttacagagtgaactcacaaccaatatttagaggatacattttcgtgacatgccctttaaagattaatattagatctgaaatctgggtaattgatggcattctgcctcatagacacagcaaccagacagaaggcagctcagcacatccctgctatttccagatcaaagcgcatgtcagttcggcatcagctccgtctcacactgcaccttccgcctcatctccccactgtcctgcgggctggtccattggagctgagtcctgggccagtgggtgtggtgtgtgctgctttcaagagaagccctttcccagggaaatggttcttgacagtcctgctggttggaaacacacctctgcgtaggttggtgtgtgttctcctgcctcccgtctccaagaggcgtgagttctaagggctcccatcctctcacatgcaccatgaggactgtcagccgcatccagctcagctagatgatacgagtagctatgtgaggggtaggaaaaccaggtattcagttttgaactgagaagtccggtatttctgcttgctataaaatgagagaaatacaaggcatagaaatgcctttttctccataaattaagttttattatgaagagatgacctggttcgaatgcactcaagtggtaccaactcacacaaaatagaagtggggtttagattgctgccgacactctgtggcaggtctctctttatttggtctatccctggccaccatggtgactcatcttttggaatcacctggtggctctaaggaggaagaagtctggggccctctcaatagcctttcccaggtggctgtcccctgaggggtcacctcccagcctgagctccaaagcttccatccccaattctctgggctctcttgagggtgctcaggtcctggggatcttggtcccactaatgaaggtcagaagatccctgtgctgtggtaccaagtgtcatattttataccattttttttaacctgtagggagtctttttgaaatcttaagcaaaatttataacaaggttatagctttccagtttgtgcagtactcaagcctactatcttcgtcactcccgtacttgggcagataagtgattaaatcatggaatccgagtaaggagtggaatgtccccgtttcacagagtcctaaagaatccccattgtgaagcagctttcttctgggcacacgactttattcactcatctgtctatcacctcatccaggccttggctactgagagttcccccacctacaggccctgggccaacagggaccatggttccctcatggagctcataatcaggggaagacatccaggcagatgatcggagcacagtcatccactacgatgggtggtagctcaggaggcagcccagggggtaacgtttctgccctttgaggagttcacaagcaggtatataggaaaggactctccaggctgatcccacagcaaggagaaaggcctatcacagatggaaggcttgactcagtagaaagtggttagcaggccagaatagctaaatcctaaagtgtagggagcagagtggcagggaggagagagcagctagggaacaaagctaggttgggatcaacctggaagggcctggactgtggcatttgacatgaccctataagctttaggagacattgaagtttttaagtaaaggaatggtacacgaggtctgcacttgaaagagaactccagtgatattgacgtgggaatatttgtcttggccatgaatggatcttctgggagagggcccggaggacactccctaacatcccttaactctgtgtggagcttgccttcactttcacaccttctcgattatattttctccacttccatcttcagatgacttcttcaggtcacatggcaaggtgttaccctctcttccttcacatggcggaaggcagtggatttaggagatcaccgtgtccacccagctctgcccttgaccagctttgcggccctgacaagttccttcccttctgggcttcagactccttctggggggcatgggaatgccagtgccagggccattgtgaggtttatacgaaaacacctgttactcccggcgtgctttgcttcccttagacagatgctctcgtgccggtatcggcttcagacacccagagcatccaagacaccttctctcttcttgccctttggtttcaggggaggaaagggaaggcccaggacctacttttacctttgcagaccatttttgataagactttatgagtagaatctgggtgagggctatagaaatcagctgtcatgtaggatggaccaacttagtgagatttatacattgcatcctcgggtttaaatccaggttctcaaaaattaccaatacatatttaatacttggggtgactcagcatttgtgagaatgaagactatcagagctggatcttaaacatcttctagcccagggcttctcaaacctagttgcacattagaatcaccggggagctttgaaacaatgctgatccccagagcccacccctcagaccaattgaatcagaacccctggggttgggggtggcaggcagcaacaatcttttcaaactcaccagtgagcaccaggatgagtcactgatctagcccaacccttttactctcagatgggggcacagacttcattgcccaaaagctgggccccctgatgccaaggccagttctcttcccatcgttacttattcaataggtttctttggatgccattatatgttagatactgttctaggagctgggggcgcagctatcatggagcttaccctttaaatgcacgagtggcctccagattggtgggggcggggggtggggggagcacattgaaactgggtccttccagcagtgtgtcaagaaagtcttagcctctgcacatcattgggatggtaatgataacaatagctaacacatgctgaacatttgttttagatgtgttatctttctgaatccttgcttcgcccctagaataatcagccccatttccagaggctgtataagtgtgtttcatgggtgcagagctagtgcctggtgggcctggcatttgaacctagggctgtctgacaccaaagccctttctgtttactgactttattctaaggcagccagtataaagatacaaagagagcagtttctggagaaatctatctgaatttcctctcaaagatgtagcccctccatcagttagtttttgttgcataacaaaccaccctaaaacttagggcttaaaccaaccaacatttagaatttctcatggttctgtgggtcagtgggtgattatgctggtctgggtcaacctggctgcagccggatggcctgagatggccccactcccttgtctgtagttggcagggtggctgctccagggatgccttacctggggatgctcgtgtttgctccacgtgatctctcaggctccaggaggcttctctgagcctgtgtacttggccgacccagcactccaaagccagggaagtctaacctggcctcacaagcgtgtttacgtctctgctggtgtcataactgctaatgtcccattcaccaaagcaagtcacatggccaagcccagattcaaggggtgaagaaatagattacacctcttgatgagagaaatgacaaatcatattgctagggggcacacatacgcggatagtgtgacatgaccgcgtaggtgacaaatggtgggatttgccaccatttttgccatctaccactgcagaccgcaccaaagaagacttccggccctgacaggtgccaggagttgttaaggaggaaaaaagtgttgtattgttgaatttatttacatacactttagagcactttctatggtgccctagagatgcatactttataattaagtaactctggtgtttgtgatcatttctattacaaattggatatcaaccctgggatagacctgtaataaccttgtgtatgccactcacttttgtgggaaatcagatttttttttttcttttgagacagggtctggctctatcgcccaggctggagtgcagtggtgcaatctcagctcactgcatcctccacctcctgtgttcaagtgatcctcctgcttcagcctcccgagtagctgggaccacaggcatgtgccaccatgcccggctaatttttggatttttttttttagtagagacagggtttcaccatgttgcccaagctggtctcgaactcctgagctcaggtgatctgcccacctcggcctgccaaagtgctggaattacagatgagagccactgcgcccagccggaaatcagatttgattgaagtaatttaaactgaacatcaccttttctggggctgtaacgtgaggactcccccgggtgttgtagatcctatcctttacttcagtatcctgtaccttgtgtaatatcccttgtctgatgttttctcataataagatctgttatgcattttggcaggaatcctcctgaggccatcgatagagtctcactctcagtgcatcctgttgggaggcccacggtgctggtgtgacccagtactggtgaagttagcttcgatcacctggcgaaggtgctgtgtagcaggtttcttcactgtaaacttactgcttttacctttgtaattagtaggtaatttgtggggaatactgtaggcctacgtgaataacttgttcctcatcagattttcacctgccacttttagcatccattgatttttataactctgccatttctccagtatataaggaagaggtttcccttatcctcagccagtttatttctttatattggtatggactagggtattcttactcatagttgtcattttttattttgatgctcaaatggattcatatttagccaatgggaaccccttcaggctggctctcatgcccttctgctgtgttcccatgattctttgagaacctctttactttctggcacaacaagatgttcctggccttttcccttcctgcccagcactgaatcagccacttctccaaacagctcctgtctcttttagaggagatgctagaaagcagagtctgggtatgaggagtgcccattgcctctgaactgccgttgcctcagcagagagaaatgtatgcacacatgtgtgtagagagaaatatatgtacacatatacatataagtgtacacacacacagatgtgcgcttatgtatctgtctacaactacatattaaaaccgactttataatgatacatctgattttgatccaatatcacagagtacattctgatcttcccattgtttttgccagcttggaacgttaacattcctcagctctgtcccaggtctgcctctctcaccatgttccagaatatttcatcttctctcatggtctcaattatcaccatgctggttacttccaaactcaccctcacatccccgcccgccaggcctcatttctggatctccacccggcagccctcacacacccatctcacattctcggtcataatgttctaaccagtgttgaccagttgcctccccttggctgtggcccaagcccctcaaaccagacacatgctcagcgggacccacgagttcatctctgctgcttttccgctggcccccacgccccgtcagtacctggcatttcattctcccagctctttaggccaggatcctggggtcacccttgattccgccttgcccctctgcagccagtggccaggtctcttgattcttccatctaaatgtcccttggccttccccagccactccattcttactgccactgccctcatccgggccaccagcgtccctcgcctggttcagtgtcagaacttcctccctggtgttcctgctccagcctcactccctgtaattcattctcctctccatagccagggagacgctgttaaaacctaaatctccccatctctctctccagctcaaagaccctttggtggctccccagggacctcatgatgtccttcagtctgctgagaatggccatcaggactcctggcaggctggttcttggttgtctctggaccctacttctatgcaacagttaaaaaggctgagacacagagctctaagaattgatgtggaaacacagtcaattgaaaaaaagtaaattgcaaaacagttacttatgctgtgatgctatttttattaaaaacacgaatacatacaaaacaaaattctggccagctgtagtggctcatgcctgtaatcccagctacttgggaggctgaggcaggaagaccccttgagcccaggatttcggggctacacacagctatgatggcaccactgcacttcagcctgggtgatagagcaaaagtccatgtctaaaaaataaaaaaataatattctgtcctttttctatacatgccaacacgcaggtgaatgcatgggagacaggccggcaggaccccaggcactgtgtacagaccactaccaaggcttgctctgagaagggtccagggatcagcggctccggattcaaggggtgctttgacttagctatcctattggaatggtttccttagaaaatatattcatgtgctgaagtgttaaagagtacaacttaaaaatatagatgggttggttttgagaaggtaaaaagagccctggcagagaaagtgcgtcttccaagcctgaggttccctgctccacaaccgaggggtgtatgtgatgctcagcctgggggacaggcgtgctccgtagtcacaggccatgcctgtcaggcccttgctgtcagttaccccccgtggctgcagatcacactgcctgttttagagcatgccttcttccagaggatgtggtcgctactagtggtaacgtatctgcattggaccttgggtctgctttttgttctgcatctacaaagctcctttggtctcgagctcactgaggagtttctgcgtttgtcgctgtgggcagcaggtgtgtgcactgacccagtggcccctcagccaccagggtacctttgaactcatgtggaaaagtatcactgagttgcgttttatctttaccttgagcaaaatgcagttgatccctgccccaagccattaaatatttataacgttaaaaaaatgtttctttaatgtctctgagcctctcttttctaaactgtggaagaaagacaataacaatacctggactgctatgatgtttaaatgagataaaaacataaggccctaggtacaaactagctgctcagtaactgttagccactggtattagtattagtgagtattagtgttattactgccgtacagaggaaaataccctttcgcggtagacccctttctgcctgctttcccataaaaacaggagtgcagccatattaaattacataacccaggggctgtgagtcccaacccaaagacgtttggagggacaaaagcaatgtttgctgaggagtaactcattgggtcccccagaccatggctctccgtggtgtctgctatctctggtgttgcaagtcaagctcgacttggaagcaagatccaagcttctgaggctcagtgagaatgttcttgttgtgtgtcgagtttcttgtgggtgtggactgtggggcagctgccttccctctgtgctcccatagctttcagagaactgccctggacctgcatgaggttgtgcagcccagcactgcaccctggaccctggagggagggactgccctgaaggaggaggtgggggggctggtggccctagattcctcccagggcactagggatgcagagggatgaagcgagcccctcaattacagtcttctgtgtagagatggggagcctaggaggagtcagtgctctgtgtgtgtgtgtgtgtgtgtgtgtgtgtgtaatccagattgctcatgccaaatagaacctctaagaatgttcgtttgtggtgtgagggcaccctggtctgggtgcccaatgagtgactccttagcaaacattgcttccgtcccaccaaacgtctttggattgggtctcacagcccatggattgtgtaatttaatatggctgcacttacgttcttatgtgaaagcaggtagaaaaaggtcaaccgtgaaagggtatttccctctgtacagcagtaataacactaacactaatacgaatggctaacagttactgagcagttcgttcgtacctagggctttatgtttttatcttgtttgaatgtcattgcagtccaggtattattattttctctcttctacagctgaggaaagagaggctcagagagattaaatacttgtcccaaattacagaactagttagaagtggggcctggtctaaactcatttcctgcagaaacagctgctttcgacataaaaccgcagccttgccccattttctcagtggctgctgtggtcaggctgttctttcctgttgctgtctgatccctcagcggtgctgcggagtgggcacaattatcctcatatgacagatgaaaatctgactctgaggctaagtgacttgcccaaagccatacggccaacaagcactgggcccagctcggcgttcacacgtgtctgactccggcgcctgtgctccgtcctcccgtgctgcctctcacgcgggggactcgggaggctccggcagtggctgataaatcactccttttggcttatgaataacatggcaaaacaaattactttggggatctagaaggaagttgttggccctgtgtaaactcaattggaatgtcactgagcagacagctctggaggcatctacaaatatcttccaaggaatatccccaaagtgaaatcaccaagaaagcaaaacaggctccgtgttttggtttgcaaatgagttttgagaaatggccttgagatcttgagttgttggcgttttccccattacaaattgtaaaggacttttgaaacgccacaggaaaggggagaagaaaggcttagggttgctgattatttacagctccaagccccgggcaggtacacagaattaaaggcctcccaccactccaattgcatttaattttattccgaaaatgactacctgccaataagcctcattgttcaccagcatctctgcaagtactttgaggtactattacccgagttcacttaacaccgcttgacaactttaagcagataacaattgaggtgctggtaatagagtctggtttttttttttaatttttacatttttaccacatgactttatgactctctttatcaagcgtgttgaaattaatccatgtgttgattggagtatttcctcacccctgctgtgtattgagacgttggggagggataagggttggcggctctgagcagctaggtattccggggcaatgggtggtcctaagtccggagccttgggagttggtcagtggtgggtttgtgttgagcctgcagaagtctgaggtgtgtgtttggaggggagaatcaagggatggctctggaggactgccttggcaggtaaaattatagttcccatatgaagggaggatgcaggagctataatcccatctcgttgccaggcaaagttcctacagattcatggcagagctgtctgtgcaagcaggaatccaattttatgtccaaacaaatgcagcatgcagattggactgactgcttccccgagaatagcaaagacaggcattcaggtcagctggcaaaaaaaaaaaaaacccaccaccccctttttcctcctttaaaatagggggtgggattaatacagtagcagattagagctttatttgtttaaaccttgtagaatctgtaagcattcacaatccccttgacttgtagtgcctgattgtaaaaagaacagttgaatgagctcattgttttctggtttttttctttaatgtattttacaaacactctggtgacaggcctgacatgctgatttctatgtactggcacttcagtttgggattacagcattaataacagagttccatgcatcatgccatttttaagcatgatcgttatgataaagggcatatacttaattacaggcctgcttaattacagctctgttgaagctcgtttgtttaggagaatgctaattgcgccacagagccagcggcacatccttgctttcatctgctggaggtagctcgatgctgtggatcagcattttgttaaaactgccaccaaaaataaaaaaaaaatttaaaaacaagaagaagaagaaagcactggcctagtactgaaaggaaacctgccccagcacatggcttttggtaagagcagaagccagggttaggtgaccagccctccctacgtggtgggtgctttatctctgtcgtcttatttcatttttcttcaccctcaccacagcccgcagaggcagctgtagtattatgcccaccttacagacagggcaagtaaggctcagagaggtggggtggcctgtgcaacagctgcacatctgcacctgctgagctgcagcaaaaactcaggtctgccaagctcccagcccctccttccctgccatagccccccatagccccagagcaggttacactctgggtttgaatcctggctccagccaagcctcataactcctctaagccttgcaagtggtgtattagttcattcttgcgttactataaagaaatacctgagactgggtaatttataagaaaaggtttaattgactcatggttctgcaggctgtacaggaagcatggcagcatctgcttctggggagccctcaggaagcttccaatcatagtggaggcaaatccagaacaggctcatcacatggccagagcaggaacaagaatgccagagcaggaacaagaaagccaaagagcggaaggtgccacacgcctttaaacaaccagatctcgcgaggactcactcgctatcacaaggacagcaccacggggaagctgctaaaccatccacaagaaatcctctccccacatagctcagtcatctcccgccgggccccctccaataccggggattacaattgaacatgagatttgggtatttgggtggggacacagattcaagccacgttaagtggtaatgttgaggcttgagttatttgatgcctgttcaccaccttgtgtatgggcagtaagcacggattccctttccttttctattttgtagaactgggcttggggagaacttctttacctcccaggtttgttgggggtggggggctttgtcatggcacactgagagctccagggcctggagagagggccactttgtacctgggtgccgtctttggctctgccaaggaaagggtaggtgctgtccctgcatctaggttgtgagtgcagactggtcaggcagcgtggggggatgaagccccatccaagcccttaggctgcatggaaggggcaggtcaggggtgaaaatgtgtgtctcgttcccagctctgcctccatccagctcctcgaacagcatgtcaccctgcatgggactcagaaatagactaaatgctagaacatcacagtctctctgctctaaaataataacaaagacaaaatgctagttgcagctagggaaaaagaaaggaaggaagtaaacgtggctccccaggagaagccaggacggagatgattcatgaacattcttttggaatgcatgaagaatgcatgccgttgattttaagaattatgttttgcaaacctctagatgttttaaaatatgaaaaggctgcccagatgagaggagacatggatgttacagaattaagaggggatttagcagtcccacagatcagctttctacccaacacacaaaatccctccctagctccccagcaagtcgctgtctgcgtctagccccttatgctgtgaccaccatgaaaacatgtgcagacatttgattatgttcacctcaagtcttctcttatctgaaccgccacttttgctgcagttctcatgtgctggacaccatactgggctctgagggtgctgggcagggtgctaggatgaacagaaatggacaggattgtgccttcctgggccatcgaacctgatggctgcttctcctttccctcacatggtctggcttcaggttccctcaccactctggcctccttgaaggcccccgggatgaccctctgggaaggtggttctggctctgagcgccccactcaagctccaagtagaccagggtgagtgactcatccgggcaccaggactgcggcactgtaaccttatgatgctccgtttaaatagtcagatcacgtcattgacttactcacctacagccgccttctttcctgtctcctgctgttattccacgcctcttccattccatccaacacagttgggttttcggacctacactacgagactcttcatgggtctctagtgaactccttccattacatttggcccacgatcacaactttttgagactttactggttttcactctgttatctggtttgtagactgcccacctcggcttcccatcaggcgtgcattagatgagcataccctgtgtgtcttcatttgagtcattgatcatgccctgggcacccttcacaggggtcacttaaggttagcattggtctcttaatcagcttcttgaatgtgtggttcaaccagttatggattctgctaacctccacagtagccagctgtatttatccatcttgtgtacatggataacatgagaaaatttgtaagatgctttgctgaaatccatattatttcagcctgctttaatctttgatatactagattttctaaaataagtgggatttggtgggcagattatctgcttagcagagtcttgctggtcctggtggcacttgcttctctttggagcctccctgtgctggtgagaagggcactgtgagagccccgctcctctcgattcagctcccactgtgagcttcagcccatgggatcctatcacctcctctttctttcctctgagtttgttaaaatctgttttctaggccatgtgtggtggctcacacctgtaatcccaacactttgggaagtcgggctgggaaagtcacttgaggccagaagttcaagaccagcctggacagcctggacagtgagacccccatctctacaaaaaataaaaatctattttctagaagaacatagggagcatctgactatgcccctccttctgtcgtgaactctcagacggtggtggtctgtcctgaggctcccgtctctgtcacttgaccagacagctcctccttgcagttaggattaggtcagagcaggtctcctcatctctgctgctggtccagtcaggagcacatgggccgaggggtggagcgaggccgtcaaagtcctgagggccccccttgctgctgcatcttgctcctcagacatttcaggaatgcgtcttccttccctcccagtggctgctgtgcggcatcccgcaatggtctcacatctcatctttgcctcctcactaaggtgttaccgctgagcctgcctgagggccagaaggtgccctcacccaggcacctcaatgcctgcatgtggagcaggttggccatgggccccaccaactccccagggtgccccagaaggtctgggagggagggcttcacctctggagggcagatgtgaggagggcctgcagacaaacgggaagtgcctctgagggacttcagggcccactgggaggtggggtgagcaccctgcccgctccctgcagtctctcagtggctaagggagggccttgtcctaatcatatgtgggtgtgtgtatgcatatgcatacgtatgcacttataatggaaatatataatttataccttacatattatatatacaaaatgtagaatctgccggtcgcggtggctcacgcctgtaatcccaagactttgggaggctgaggcgggcggatcacaaggtcaggagatcgagaccatcctggctaacacggtgaaaccctgtatctactaaaaatacaaaaaaattagccgggcatggtggcgggtgcctgtagtcccagctactcgggaggctgaggcaggagaatgacgtgaacccaggaggaggagcttgcagtgagccaagattgcgccactgcactccagcctgggagacagagcgagactccatctcaaaaaaaaaaaaaaaaaaaaatgtaaatctataatctatgtaaaggtatatttttacataatatatgtgatatatatatatttgtgtgttaggctgttcttatgttgctataaaggaatacctgagactgggtcattgataaagaacagagattgaattggctcttggcccacggttctacaggctgtgcaggaatcatggcactggcatctgcttctcgggaagccccaggaagcttccagtcatggtggaaggtgaagggggaacaggcgtatcacatggccagagcaggagtgagagagagggccaggggaggtgccacgcacttaaccagatcttgtgagaatcactcactaccgtgagaacagcaccaagccatgagggatccacctccatgacccaaacacctcccaccaggtctcgatctccaacattggggattacattttaacatgagacttgtcagggacatatatctaaactatgtcaatatatgtacaaaaaatgctattgttgatatctaagttttacaagtgtatagtccattttcatactgctatgaagaaatacctaagacttcataatttataaagaaagagaggtttaatggactcacagttccacatggctggggacacctcacaatcatggcagaaggcaaaggaggagcaaaggcatgccttacatggcagcaggcaagagagcatgtgcaggggaaactcccctttataaaaccatcagatctcatgagacttattcactctcatgagaatagcatggcaaaaacccgcccccatgattcaattacctcccactggctccctcccacaactcgtggggattataggagctacaattcaagatgatatttgggcggggacatagctaaactatatcaacaagttacttttttatccttgatttttatttaaagccctaaactcagagcagccagcctgggcaacccattcttcctcatctcctctgctgactagcaaggcaagagcgcagcgtgacaggaggcctggctactgtagtcagaaagccaggcttacgggaccacctatgtttctagatccttctctttcaaagacgtgatcatcagttggaaggagaaagaaacacacgctccttgtgggagcagggagaaactgcttcatgggtgaggggtttggctttggagcgatggaaatattttggaactagatggaggtgatgatcgcacaccattgtgaatgttctaaatgccactgaattgttcactttaaaatggttaattttatatgaattttttaaaacatttccctccctgcttagatcttcctagttcctagaagtgattcccaggcttcttccatccatggctttcatctccagcagcagcaggcgggggtagcagtgagcagggtccccaggtcctgagagagttaggcacttgccccaggctggagccctctacccagttccccagatccccgtgcatgggaacagcagccctccctgtccagcacagcccctgagcccccaggccctgcccctgggctggggacctggaatgcagaggtgactcgcacatgcacctacaataagaggagaggagacacgggcctggccagaccccagggaggacctcggggaaggcatgctgcaggagaggcactcagaagactgggaaggacagttgaggtacaagcatagagggagggaagggatgggtaagccgggaagagggtcaggtgcaaggggccagggccttcaatgccagtcgagacccccatcttggaaatcctgcccttctctgtccattggaggcacaggcagtactgacagcctctgactagggaggcctcccatgggaggagcccccttcctctctgccacccccagtacttctcagccccctcagttcctgatgtaatcaggtctttgcacatcaccttaccaccttcgtaacacacaggatccctagacatacagtgacatgtagatagaaacaactgtcaccagtgagaggcagttcttcactcccaaatactaataaggtctttaaaacatcagaggcagaaagtctggggaatgaatggtgagtgggttctgcaggggagcaattgccagggcctgtgcacagtacctgggcgtgcagagaggactctgctgtggaccctgctgtctgtctagcaggcaagagaagctgtggaagagatggatgtgggcagagagtgggaagtgaggaccatgacaggtgaagagtgggcttcgggactttactggggaggtcaagtagcctgtactatccagagctttggggccactgctgcctacctttgtgaccccagcaagcaccgacttctcagagcctctgcttcccaatctctaaaatgatcggaagtgttacgagtgcccggcccatctcagcagcactaggaagggcatggaagtcaggtcaggcagatggtggtgggagctggcacacctcttcctggatatccggtgggacttgactctgcccttctctagaaggctttgtggctcttccagactcctttattcattgctgaactttttcatctgtgaagcagcatacacgcataggtacttagagttcacacacaggtctgcacgcgggatgtactgaacgagattgaggcccaaatgcgggacgtactgagtgagattgtttggggccttcccctcaccccactttctggggaagtgttgcctgttcgggacttttgtcccatctcttccgtcagctcacagcaggttgccagcaccacctgaaatgggagaagccctctgaccaggagtctctgtctaagtccagcagccacactgggcagcggcccttccaagagaggagggcgcggggaatgcagcgactgccgccacctgtgctgtgtctttttcttcatgctgatccaagaaggtttcgtttctttccttccctaaaataaagtgtgagcagagttctatgatgttttatccctgtatgaacgtagcatgagccattcggcttttcttgctgattgggaggatccgttccaggttttttcttctcttatgtcctttcctcttgctttgctgctttctgcttctgctactcttctgtgttaggactgagaaaaaaaaaatatgaccactgaaggttccagagaagtcatcattccaggagacactgggggaagcaaagattgttggtcccaggagcgcactgcccgacgctgcccccatgctctaccttgcttccattgtgctcactccgtttctccctgaaaccacaatttactgcatagccaccacctcagggtgcggccacccctgacttcggggctccgcgtccctgcactcatgaccaggcccctaacaactgcggctgcatgttcccgactcttcccagacctaagggagaagccaacactggaaaggcccctaccactgtcccagcagccgcatggctgccacgttggctctgtgaatgccggcatcacgtctcgtccagtgtgacctgttcctcaatgtggcaggatttccagtcctggtgtggcaccagagtcctcctctctgaggttataattcatagagaagtgctcacttacggaggcacaccctgggtcgtttctgtccgtgtgcttttgaaagcgatcccctgggacagggcggagggaggggtggccacagaaaaggaaccaggcccctggtttctccatcgttgcgtccccgttccatgccctttttctcgtgtcctgttaaaattgagcacactggtgagcctctagtcagcccttgatgccctgggtctgagtgactgagagcgacagccactgttgcccccacatgccaagcacctgctctgtgccagcgctggccaggtgccccacacactccacttctgatgcacaggcaccctgtcatgtaggtggcgccatctttttaaatgtgacttcagtttttcgtctttcaacttcagttgctcatctgcagtcaccagctgggatttgaacccagccaatctgactcctgagctcctctttcctcccacttagtcttttcccctgagtccaacagcaccttagagcatgtctaatgcacgtgcttactgccttcatctcattgcagcctgtccctgccagctgtgtcaccttcatcctgctgccagcccctggtgactctcccgttacagatcagagaccagactccaggggtggagagtaggggttctggaccagccgctctctgctcctagagctcttgtctacacaactgcctggtgctcaggggatgacgaggcgcctgcctctctcagtaggttgtgtgtcctggcagcaggggtgggacctgtcctctttcatagctccagcacatctgtgctggatgtcacctggctccatccagtgacggattcatattctctgtttcgacatcttcagttgctggacaactaaatgccatcttcaatacctttaatgccatctttttttttcttcttttgcagcaatggatggtgtgccttttatgatttcagagaagttttcttgtgttccagaaagtgtaagttttatgcatgatcgcccttcccctctgccaccccccagcctgaggtccctccatcctgatttacacagcacgcagggctgttctggcagtactcacgccccttcccctaccggaatcttgtccgcctgcgtgtcctctctcccactggaagctgaaccctgcaacccagtgacaggaactcctgaggttggggggtgggtcgtgtgcatctctggccctatcagccagtgccccatgtagtaggtgtttgagaaatgaagaaaacaacagctgggggatgggaaagtagcaagaggctgtcagacaagctcaggtgcactgagcctttgccatgccgcacgtgattaacctgacctgagcttccctggttgtgaatgttctttgtctcccaagtccaacttagtaagttttgttctttcttacttaaggatgacaatttcctgtagaaaggaggctgcctcgttttcccattgtcatagctgcattctgcgctctgacacggaggccgccatgcaaatgtggtgcctctagctgtggtctcctgcccatgccagtccagcatggacccaaccatccacatcagcactctcacgcaggccaggctcacgccatctttttatcagagggaccgagtgagctggccgggaccaaaggccaacttcagactgtgaggggcggccaccctgcatggcagtggggtctctgcctctcactgctagggtcagccctccaatggcgccagcccccaaggtggcagtggccccctcccagctgcgcaggcttgccccacgctggctcagcaaacccgtttctggttttgatcctttctgcagaagttggccttgactagctaataaacatgaaggccccagcttgggcacagctaaagaatcctttagtgtttttcttggatccagcttaaaaccacccggcttgcgatttgacctgctctgtagtttccattttcgtgaaatagaataggcctcctctgaacccttctggtaagcagcttaatcttgaaaaatgctcgtgatgtgacatgcggagctccaggaacttcagccgactccacggggccgcgttgccatggcgacgctggcgcctctgccgccgttccctgggagaggcagctctgtcctgctcaccagctccagttgggagaatttagtggggtggttagagcctaatgacacagcagctgcacctctgctgggtcgcaggcaggcggccccgctctcgcacccctcgttttggcagcacagagagcaccacactgttccgtggctaccggcagagcagccgcgagcggaacgtgtgactcggtggccccgtcccaagatcgccctcgcgaatgtgctgctgccgggcgctgccacctcggccagggctccaaggacacatacccagccaggcccggtgccctgcgctccctgctcttctcagtgcagcgccccgcagccccactacgggggccgccgcttttaatggacgagggaatgaggaagggatttaacccgcagctgcatcgccaggaggcgctgagactggttttgagtctgggtcctcagactccagagctggcctcacaggaaacccctgctggcttcgcggaggctccagctcccctcccatccctgagctgccgcccttcaggaccatgcgggccctggggttctgtcgaaggccctcaggtttagccttggccccaggaggctgggccagggacccttctggggagcacagaacactcatgtgcccagtagggactcagaccaggagccacatggactggacgccctctgccctccgagcctctgagtccaggcttctatgggcctctagctcactcaactgccatgtgtatttgatttttcatgctgtctgttgaaaagccagcatttttttaagtctccaatcttcatgaaattataaaaactctcattaaaatgcaatgttatcattttttccacatcgatttctcaaatgataattgatgggcagttgtttcatttacctggcatttccaaagacctggaatccccccagctcctaccctggattccccctaaggaactcttcctccctggagttccttaaacctcctgccttacccagacacagtggctgggcggcctccggggagagcttgggcacctccggtttatagctgcagcgagaaagagcaaaccttgcctgcgtgttctgctggcagggtgagaagacaggtgaagcaggccagccacggtcagtcctccaggagacctggatccccctgggtgccacagaccacaactaggcaaaggtcccgcagcacaggggccagcaccttgagggccacattcctgcagcaggctctatcatcacttctcctgccacccccacgcgtgaccgagagtcccactgactgtcttcctgtggaaagtgggtagagaaacgctagatcacaccgtggcttgaggtgttaccattgtcatgcataaaagtaagtgtgggaggagcattttccagctatttaaaagggcaacttcatctgtgttttcagatgcagccctttgatctcctgggaatcaccatcaaatctctagcagaaatcgaaaaagaggtaagcaagccatcaggggaggggagggcaggcctgggccatcgcctgcacaccggcgtctctcgtgtgttcccctagggatccactccaagagagggacaggtggaggtgttccgttctcttctgagaaaaacactttcgttgcacccaaatgtgtttcttagataaagtaactaaattctaatgtatttcctacttccagtcaaatatgacccacatcttgtcttctctaagtcagaatgttttacatgacagacagagcctcagttctccttttttaaaagaagtctcagctttgggaaggtggaggttggaggacaggcaccaggttgacttttcttcctccatttgttttgttttattatttgccaccaggaggggtttcgggaaatgaccaagcgtctccacaatttaggggcaggtcagggtaccttccactgtgcttcatgaggtcagggtaccttccactgtgcttcatgaggtcagggtaccttccactgtgcttcatgaggtcagggtaccttccactgtgcttcatgaggtcagggtaccttccactgtgcttcatgaggtcagggtaccttccactgtgcttcatgaggtcagggtaccttccactgtgcttcatgaggtcagggtaccttccactgtgcttcatgaggtcagggtaccttccactgtgcttcatgaggtcagggtaccttccactgtgcttcatgaggtcagggtacttccactgtgcttcatgaggtcagggtaccttccactgtgcttcatgaggtcagggtaccttccactgtgcttcatgaggtcagggtacttccactgtgcttcatgaggtcagggtaccttccactgtgcttcatgaggtcagggtaccttccactgtgcttcatgaggtcagggtaccgtccactgtgcttcatgaggtcagggtaccttccactgtgcttcatgaggtcagggtacttccactgtgcttcatgaggtcagggtaccgtccactgtgcttcatgaggtcagggtaccttccactgtgcttcatgaggtcagggtaccttccactgtgcttcataagctggaacacatctggcagcctgctttcaaacagttcacacattttcctaataaaaaagaaagaaacccaggactggcatgcggatgataactctgaagaaagggagttgagtcagaccaccagggccctcctgtttccctaagacagcacggggtgtgtggcttctcttctgtagagcgggtggttaagcagtcacacgccacagccagctctcctccgagaggaacattcatctcaaagatggaaatggtagaaccatttcaatattctccattccttggggttttctcttgtgtacccagctagcagaagccggctgcattattgaaagatggctgaaatcaagcaaaattgaatcaatgtagtacaacaaatttctaaacctgtcatagcaaaaacaagacaaaaaagtccccctttgtctttgattttcagtaaatcataaaaaccaacctgattgtcatatatagatttttttttctttttttgataactcagggaaaaaatggctggctgggacattagaaacataggtgtgcataaaatttcacacctgcccttctcaaagcaggggagctgtgggtggctgtgaagtccacctgcttatggacagcccatttgcatggggccctgcgtgtggtgcagcccagggtatgtgaggaaggcctcagaggagctgctgctgccacaggtggtcaccagggcagaggttacactgacatacctccagaccagcccgctccactgtggacaggggcaagtcacatacctgctgtttaccatggggtcacggcagaacctgtctcacggggtgctttgtgatgccaaatggatataggtgggacgtgctggcagcagcggcctcagcgtcgagccatctcccctcccgttctgctccggcctgcctgtgggcctaatggtggcaccgtttaagcacctgctgtgtgctcagcctggggcctgaggctttccatacgtgatcactggttcctaccccaggcctcattcctccctgtgtcgtggggagaaatggagactccgagaggtggagtaactggccaaagacaaggtggagacccagtgtgtcgtgctccaagtcctccccactgtgacggaaagtggcagctctgtgtccttccaagggggctctctaggctggtggccagtcagtctagttccttaacctgggtgggccttcgagttgctggggtggggtgaagtgggtgacggtcccagtgtggggtccagggcgggtggtgggaaccctgcaaaccttattctcttccccactctaaggactgaaatctgtgattcattacaatgtagtgtctcaatgtcgggcgctccgagtcacagtgtggccacccccaggaggtgcagagccaggggttggggcacaccccggagtcagtgcctggctagaatctcagatcttccactgacttttctgagccaacatttctttttctgcacgatcaggatagtaataatagtgcttagtccagagtctatgtgggtttaactgcaaaggtccagtgaatggcctgaaccagtgcctgcctcagtgctgctggctgccactgtcatcacagccaccaccgtcaccatcgttaccgttctccttgtccacagagaagggcgtgagtcggcacaggcccacccattccactgtcccgctgctctgttgctggggctgaaagctccatccctgtggaccaaggtcagctgtatttcttgggtttagtgacgggttaaaagaaaaacaggtctgggccaggtgtggtggcttacgcctgtaatcccagcactttggaaggctgaggcaagcagatcacctgaggtcaggagtttgagaccagcctggccaacatggtaaaactttgtctctgctaaaaacacacacacaaaaatagccaggcttggtggagcacacctgtagtcccagctactcaggcggctgaagcagatagaaatcacttgagcccaggagacggaggttgcagtgagccgagattgcaccattgcattccggcctgggccacagggcgagactccgtctcaaaaaaaaaaaaaaaaataacaaaacaggtctgtatttgctattgaagtaaattaaagtcgatgtaaagaaatgtgggggaatggggagaggttagaaccttaaacagggtagaaaaccataacaagtatcgctgcagtggagagctccacagagtttttcatttaacctgaggacttaaaagttccttataccagccattggcatgcacagccattcgcgtaacgttgatgtccacacactctggccaacgggctccttccgcagccgtggcaaaggcttttctccgtaaataaacctgaagttgcttcttttagccactgaactcggcattgctcgtgggagttgggggctcagggagaagtggtgcctggagccagaacgactggctgtcactcttggactctgcaggtttggccctggagtgggctgtgttccctgggtcgggatgagtttgattttgtgccttccatttataacaggtctggctgcccttagtgaggggcttgggggtggagaagtctctgctcagaaatttgctttgctcactgtaaacctttgtgttttataccattaaaccaaaaaaaaaaaaaaatagagtaaatacaagtgggagactgctttcaggttcaggggcacagacctttgaccgtgcctcccgctcgtccagaacatctccccaggctcgcccacgattcccagacagggtggagagcctggcatccagggagaggctgctctgtgctgggcaggtgcttcccttcaggatccctctgcaccacgtgggaggaaggggggtccacccatttacggaagtctggactcaagaagttaagtgactggccagattcccacagcagcaacccagagctgaacaggggtctgagtgtgaccctggctgaatacatgaccgtcttcatctactgaagagtggtcccaacttgaagggaaatagaagtgtgagccctgaggcagcactgtcctgtccttccagaactgcagccagtgtccctcctgccagcgttaactgtcctcaccatgccctgcctgagggatgtttctgaatcgaagccgaagcacagttgccaccattcggcttcagggacggtcaccctccaacaaaccgtgtgaccctgtgtattctgagcatggaggttagggacatgggcagccacagggagctccccagagctagccaagcagagctgcctccacccccacaaggacacagatggcctggcctaggagctgcccagcactgattgacaaacagggtgtcacttggttgtgggtgggtgtccctcagcccccagcatcctgaggagccccagggagcatgcgctcctgggcccggacagccaggctgccctggagaactggaaggggaatgagcccattcagatgccggtgtctgcagggaccctcatgggctgtgtaggcagtggacaggacacagcctcccagtgtggatgcctggggtaggggacaaatttgctgtataggcttggccctggggcatgttcccaggccccctcaccccaaagtggaacacaggcctgctcatcccagcccagcgcgccacacagcgcggcagtcagggcacctggcagctggtggagcgtggttagatgtagctgccctgctcttcaccagggtctccccaagagtcgtggtacctgatgcacttgggtgaaatttcatgaaaaatgcccaaggacggtcatgttttaaagttagaatcagtggatgcgccattgagcaaattttgaaggaaaggatctgtggaaagacagaaaacctctcacgattcagacatgctccatgatggcgcgggtggctgaaaatgaaggaagccgtgattcatagagaaattccaactcaaacgccgtcaccctgctggctccccatgacagagcagtggccttctgcctggccatcttccagcagccatgtgctcctgccacctccgtcacctcgcacccagagcaggggctttgctgtcctcccagggcccgcatacatgagtcccaggcatgaggaagtgaatttttacctcatcgtccctcagccagggaggtgaccaggggctggtcagtggcagcctcgtggccaccgtgggcagttttcttgtcccggccccacctgtccgtgccttgtcccctcccctccagtttggctctgcaggagggcagtgggtgacccggtggggctgttgtcccagtgaagcccttacggttctccagacaaaaggctgtctgtgtcccagagcctggaaagtgtaatttcgcagccagcgcccatgatgaagcatcttctctgggcgtgaggagatgggtgtataaatattctctgtctctgccgctctttatttccctggtaagcagttgccccatttctctagctgatggattccccatcgcaaccagggtgggagctgcctggctctgcagtccaggcgggagcttctaaaataatcctcatgtcttgattacctgtgtatcctccctccccacccacggtcccgccctggcatccgtggaagacctcaccatcccggtcaggaggcagcagccttgggtgtaggtttcatgctgtgtgcttaactacccgcaagccttgtgagaacaggagtgaaccattcctgtaatgacagggcaccgggcagtggagaagtccggagcgacttccagccccatgcggagccgtttctatcagctgccaacctcagcagaaaccacagtgctccccgttcccttccaggagtgccaccatcaaaaccgcggcggaggaagcacacattagcctgccgcactcctggcggagcaacagcctccattttcattcgactttaaagccgaaagatgagggagggtctaattagtaaagggatgctctaatattaatcacccgcttaaaattgacaagggaggcagttcatttaaccacttaattgccacaggtttttatgggctgctgtttgcagacatatttaatgaagaagttataaatctaagggagcttacagttttaattttatacctaaatattttccttgttctcatgtttgtagtcagtcctcaagagtgtagtcacgtggaatgttctttaaatgaacatatttgctaactggcgtgatttcagtttttaaaacactggttccagcaattaggcatttttttcagttcccaaatgactagagaaatccgtcttgattataattgctcttagccacgcatatctaatttgtgtctttttaagtgttaattagtaaacagtttgagctgacatctttatgtgtttgtgcgttgaaaaatggggcttattgcttatttagcttggggccgattccactagcatttacgtcacgacactgaggtggaattaatgaaaatgcatttggcagcatgaggtaaaaaggatttttgaattcaacttttagacgtccgcattgcgtgggcttctgcgggtctcttcaaatatacgaggttagcgtagatttgggacctatgtcccgcaggaataaagtgaagcagatttttgtatcaataatgaaatggcagcgtcccaattttataaaagcaaaatgttcctattcccgcacaattgttcattctttctacttttggaaagctttcctggtgcttattagatgttgaagaattttgtggcgcgaactggtgcagcctgaaaaatgtgcggtccctttgcaccatctagtggtaggatcttaaactgcagcaggaaataaggtgccttttctctgcctatgagattcaatatttcaccgcccagaatccttgttatttctttatttttctgttagaaagctgaaatgtttggggaaataaatctgcctacttcagatattaaaagttagataaataaaaagaaaccaacctagtctgctccctttaatatattgctaaaagacacaaaactatcacccaaattcctacagagctgtcacactgagctaattccagcccaaaacaaagaaacctaacgaattagtaaagtagatgccttgcagaaatcatgagagaagtctgaggcttcttttcaaatacaggatatagcttgggaccaccgcttcatagactctacaagcgtctgaccacagcgcaggaatcagttttatgccacagacaagattaattatcttcccataaattgttgaggttcttttgggcagtttatcattctaagcagctcccctgccgatcaaaattgattttttaaatatttagtgtttcctgagtaccaaggttgtccatgtttataaaaatgcaaacattacaggaacatgtaaaaggtgaacctccccctccgtccactcctgcggcacgtgcacacacacacacacacacgctcagcaggctcatgcagtactgccggctgcgacctgcctctgtactatctagtatgtcttacacgtcttcgcatgttcctttacagatcagccttaccctttttaatgactatatgttgttcccttttatgattatgccataatttatctaaccaatccactattgactgacttttgaggtgcttccaattattcacaattacaccgctgcaatagatttccttgtacatgttgcctggctcgcctgggtctttccctggaagaggatgtatgttaccatttgccttttgaacagggcggggctattggaagtcccaccagtggtgcctgaggggacctttcctcacatccttattctagctaagactcactgggaccttaatgtgcccctccatttaatttttaatctctgcttattttggccaggtgcagtggctcacgcctgtaatcctcacactttgggaggccaaggtgggaggatcacttgggcctaggagtttgaaactaggctggacaacatagcaccaccccatcgctacaaaaataaaaaaattatccaggcacagtggctcatgcctttcttcccagctactcaggaggaggctgatgtgggaggatcacttgagcccaggaagttgaggctgcagtgagctatgattgtgccactgcactccagcctgggtgacagagagagaccctgtctcttaaaacaaaaaacaatttggccactcttcaagttgaacaacttttcaggtgcttatgagccactgtgttctcacgcgagcgtcttctgctcgctctctgctcagttgttttctatcagcttctgtagcttttgcattgattttaaagagctctttacgttttaaagagagcaaacttttctctatgagttcaaatacacacactttaatcagtgtcttttcagcttgtaaatgatgtgttctgctatacaaaagtttcaaaatgttcatgggcaattttctctgtttatttgggctttgtgtcatagttagattatgaaaacattcacccctgttttcccttattattttatatattaaaatattaaatacttttcaactacttaatccatctgaaatttattagaaggtaagaactacagacagctttattttaccctaaaacattagccggttttcttaatgttggcgatctttctttgactcttaaatgccacttttatcatatgtaagtggatcagtggatgtttttcttgattccgttctgctctgttattctatttttatattagtaccacactattctgaatcttatcgctttatagtaagttttaatataggttagggttagttctctcttttttcccccagaactttactaattttactcacaggactattcttccagttgaactttagaatcttgggggcgaaggaagttccgaaaagcccactctcgatttttattggaactgcattgagcacatggttgaacagaatagtaatcggaatcttagatcaagcgtctctccatccagaaacaagggatgcctcttgtaagcccaggtcttggtcctttctctttaggtcattcctaggtgctttctgtctttgtggttcttgtgaacgagatcttttttctcattctattttctgccacttatatgtaaagcaaccattgacttttgtgtaatatttctggagctagatatccctctggcttcttttactgtttctgatggctttccagctgcatttcatcggttccccaggcaggcagttacgtcgcctgtgaatgctgaggcctccatcctggcaaggtcgttcctcttcctgtgtgccattgtccgacacctcggcagggacttgcaggtccccaggcctccttatgtcatccgtattttaaatggaagtttgtagtttcaatattaacccatagtgctgcgttttgacttgctatttatagacattgttttttttttccttcatgttaaagtgttagccatctatttctgttttcctaaatgtttttatcagaaatggatggtggcttttgacaaatatctttgaatcatccattgagatgatcatattttttctccccaagcatattaatacggtggattgtattaatagagttcctaattccaagagtcttggaggcccccttccccactgcccttttgggtcttctcggcagccagtgtcctggcagccaccaccaccacacatcttgttcccgtggtggcccaaggcattcatcatatgaataagagaaccaggctgagcctgcagaaataaagtgaagcagagattacgtttgccaggcagaaccacctgccctggttaccgccatgagtcatacccgctcatgcagaattgaagtcaaggtgaacatctcgccttttgcatgtccttcagaggaggattttcctacccttttcttatggtctctgggaacttttgcacctctagttttaggtaaagtaatgcctacaaagatgaacaagtggaaagctacctggcatgtatgtaaaaataagcatcaagacaaagggtggggagggcaccttttcagagcacctcacggctctcattttccacccagtaaccagtggtggcaatcagtgtggttttaaatctcttctacaaactatctagaagaggagaaatacaaagactcactttttaggtggtattcaggtgaattctaaaatgctgactcagtgaccagggagcaccccacccccccccagggttgtttgcagacaccaaaatagcatttaggccaggcccggtggctcacacctgtaatcccagccctttgccaaaccaaggtgggtggatcactggagcccatgagtttgagatcagtctggacaacatggtaaaaccccatctctacaaaaaatacacaaattagccaggtgtggtggtgcatgcctgtagtcccagctactggggaggccaaggtgtgaggatcacttgagcccaggaggtcaaggctgcagtaagctgagatcgagccactgcactccagcctgggtaacagagtgagatcctgtctcaaaaaaaaaaaaaaatgagagagagagaaagaagagaagggaaatagcatttattcagtggccagggcatctgacggtgcacagccctgcccagagcctccacccagagcagcacagctggacacccaggtgccacagggagggaagggttggggagagcgaggcgagagcaagtcatggttttgtctttgttcgtcatgcagccgtcttcatttccaccacaaaatgtgctttctcccatttttgttttgaaatacatagttttctctatctttcattttcctacttttaatagtcacaagtacgagaaacgttttgctttcttgcttgctctgcccccatcatcctatacatgcacacacaagacacagtcactgtggtgagatggcagtggacactcttcccagctgggcgccgtgtagggagtgcggggtactgtggcaaactggagagcacaggcctctggaaaggaggtcacctccacccaccacccacctgtgagactgagggtttactgggtgagaatgagggtctggaattgtatctccctatgtttttttcaataacatctagataaatattggcatcctatgcaaagtctttccacttttcagtgtttatgactattgtgaaacaccgcacaggccagcactgtgtgaacctgcagcttgtacactgtctgcatagagaaacagaccaaatcactagacttagactcattttcatcatccacaggtgtgacatgctgctgtggatgggccctgggcttggtacttgacatgcatgagttactgtaccatgggatgggctgtcactcagtcatgcccaggggccccagggctgtgcaggcacagtgctgctgctacaaggactagaaaccaggatgaccttctacctgcccaagaactgagcccctaaactagctgctttctctcctttgcattgagctatgcccagagcctgatgtgtctcttcactcaccatcgacttgtccacccacccacccacctacccacccgtccatccacccacccatccatacacccacttacccaaccatccatccacctacccatcgccccacccacccttccacccatccatacacctacccatcaccccacccacccttccacccatccacatattaacccattcactcatgcacctgcccatccactcagccactacctatccacccatacccacccactcactcacccacccattcatctactcacccactcccccacccacccaccgctacccacccactgttcactcattcctgcattcattctaggctgtgatctctactgggctctggagctacagctgaggctccacagctgccctgagcatgaggagggtatagaaagtgttgttgtggtccgttctccccggggaaggaacacgcttcccagagcaagtgcccctttagtggtccttaaggacacgtaggactttgccacttgagggaggaggagtgttcctgacagaactggctgggagaggagagagaaccatgcaggggaaagacctctccccaggatgtggggctcagggctctgcatcagggtggggagctgggagtcacttgccctgctcctggacacaggccagatcctgggtggaaggtgttttgtgagatagggtgccctgaaggtgagggcgctctccaggcccctgtcccccaggggacaggcagcctagggcagggtgtccctcagagacagactctcagcgttgtcatcacccagtgggagacccaggcttggaggagacaggaggggctgggtaccgatgaggattgacagaatgactgggatgcggactagtagagaggaagagactggactggcagatggccatgcatttattcagtgacccgggctgggtgctgtgctgggcagtgaggacacagcagtgcccagacacacaggcttctgcttctggagctcttagctccagggagcaggggctgaactggctggaagtggggggccctagaaccacatggaaccagcggggcccttattgcaccccctggtttagggtgagaccccccagctggatctggggttccctgctcctgggttgcagctcccaggttagagctcatgaaccatctgggcgggctgttaggaaaacagaagtagcttcctaaagggtctgcgggagccctcacccacccctctgcccacgccccgcagtgtggtcattgaaggcctctcccagctgtgccctgaccccgaggccttggtcaggtggtgcagcctcatgggacctcggctcactccccagtagtggcaaggaggttctgtcctgccagactactcggctccccactcctgaccacaggggtcacagccctgagctccaggcccagctacagggcctcgctttcaaagagagcattgaacaaggaatccacctcatctccggggcatgaggtgagcatcctggcttctccctacccccaaggcccacctgctcgtgaacagccttcctcctagtgaagcactttctcacgctttctggagctggggcttcccgctgggtatgcagcctctccaatgtctctagaaccatggcccaagtaggaagcaaggacttcagctggccctgcagctgctggaagaagacgtgcagggtttccaaaccgaacagttgctcagagtcacctggggtccttgtcaaaacgcccacacccactgaagtactgcctggggaggggccctggaatatggctcagaaagcagcgggcggcccaccctcgtctcgcagaagaggcctgcaggatggggccgtggggccctgaaggcctctcccgggactgcagcgcttcaggcctcgccatatgacgtgggcactgtgctgggccctgcctctctcctcccgcagcgtttcagaagccagggctgcattcctcatcttcaggaaacagatgaggacgtggagcccctcatgtgaggaagctgaggctttaggattttagaaacaggaagagcctgtatcatagccgaggccgtgggagtgcctgagatggagggggatgactggagtgctgagccgggggggcttggagaagcagacaggtggggctgctgtacagaatctcccccacctctccctgcctgtgctagggccaggcccatccgcctgcccaagcccacccatcagtgtctgtccacccctgcaccagactcttctcgttggccccagccttggcccctttggttccctcccacctgtcctcacctggcccagcccctgccctctggactacaccattcctggccctatcgtgattcacccgtgagctcactagttcatgtctgtcggtctggcccccatgctggagttgcaccccaggagaggtaggtgccaatgcctgccctaatgcaggtttcccagccagcccagcgcctgccccctgcgcctctctgggcccaggcctcgtccagcattgcccagctcactctgggacctcaggaagtcagatcctttcttgggcttcactttccttctctgcaaagctcgggtgctgggaacagccccttactgccttttctcgtctggagccctctagagtgtttagtatgagacctggtgtgggaaggagggaggaggctggaggggcagtgcacttgccttcccctctggtgattagtgcaattaatactgaaatcacctgagtgttttcaaaaaatgctggtgtccccgtgccggttaaaccaggaccactcctgccaaccacaggtgggggccatgcatcactgtggttaaagcctttggttctgatgcataaccagggctaattctcttcactttcaaggcacttgcacacgaatcgtcctagttgtgggtagaccagtaggttctattgccccctctttgcctcgaagctgggtgctttccaggtgctgctggaagctgcagttggcaccttctatcacaggacactgacctcactatgagaaaaggcttttagaagctgagactctcgcaccgtggcctgagacgcctgcttccatcagtggcagggtccccgggacccctggcagagcctccaggacccctggcagaacccctgacagttacatctctttcccgagagaggcctcaggcccgggctgcccagctgctgcagtggcggcctgtgcccaccagagggcgcaggcccggcgctgcgcagctggaccgggctgtgcggaccaaatgctttttaattgaaaatttttttaattcaaaaaggatttgctgtttgttcgcaagtgcaggttttccttatgcaggagactaatgtcttgagtaaacagatccgggtccaaatccaccttcaaaggtactcgctgtttgcccaagggagtgaaagggcttccagaagcggccccgtctcctgggtaaacacggcgggaggagcgggcagggaccgcgtctgcgggaaggcggccgcagccagaggggattatgtcgcgggacatatgttgaaatttcatttggggagttagggaaaacaagaagcgggggtgggtggcgcttttctccagccaagataacctaaaaagggaaaaaatcccgagggagagagggtgggggcgcaatctgtgcgccctcgcggggaccggcgtggtgcaggcaggaaggggcgccttctccgccctcccccagcccgcgggccgggagagaggagctcagcccagcccggagggcccagccatgccctccccgtgaccctgtccccactcctggccacagagactgggacagcggcacagggtccccacgacagcccctctgccgaatcagccagttgctcacacaggcgtggaagcgtcctgctcccccgctcaccatccagaaagctcccgctaggcccgggcctaggctctctggctgtggacactcgggctggggctgcaatcgcccttaacctgctctctctggccggccagccctcagcactccctgccacccccaggaacccggcccagtagatacagcaagacctactgaaggagcagaagggcgcggcccaggacgcctcccccagcccctccactgccctgcaggaacctggctctgggctttctccctctatcatctgagatgcttcgcgtttgcaggcatctccctggcatggccttggagcatccaaagtggagcacctccaagccatgtcccaccccctcccccaaccagtccttccccagctcctttctgcacagcgtgtggtctctggcccttccctctctgcccatccatgtccacacccattcccaggttccagtgattgggtcgtagaattctctaaactgatccccagaccagcagcatggggttacctgggagctatttgaaatgcagattctcaggcctggccccagacctacccagtcagaatctgcatttgaccgggaccccccggggactggtgtgcgttcagagttgaaaagcctgctgcatgttctctcctgagccggggctgatggcctaactatccacgccgtaggccctcagccccgctgtctccgcaggcatgtgtgcccgtggcactctcctctgcaccttggcacctattgccctaggtgccgtccatgcccttccccagtcaggccccgaatctgctttcaagatgtgaatgccccctgccccgcgaagccctccttgctctctccggtgatccccacgccccgtgcatgtgccctcggaggtggccttcatgctgggctgtgctgggcatgcccgccccctcctctgctaccttgggagtcccgcgcagggcggatgtcagtgagggctgatgaagccagccagggaatgaatttgccgctgttccctgccgtgcatgtgcccaggcggccaccaggtggcagtgtcctcccagactttggcgcagctccccctcctcagcctcccggagccggagtctcctgaccgcggcctgtgcctggtggttggcgagcaggaaagtgagagggctggagtgagagagctggcgctgcatggtgggttctctggagcaaccagatgctcagtgatcgcttgctcagtgctagggcgcggcgggccctgatctaccatcgctcattccatcctccaggcaggcctggacatgggcgcatcaccccacctgagagatgagttcactgagggcaggagaggagaggagcctgcctgagtagccctgaagcctcgggtccttacctctgcaccctgccaggcagcagatgctgtgaacagggctcccttcggtttgggggccacatgtctgctcagcccaccgtgcacacggggacagagccagcctcagccccagctgagactcgggtctgtccatctgtcccgggtcagcctggggactgtggagcagtggcagccatggacatagtgctgggctttggctgtggacatggcgctagtctgtggccatggacgtggtgctgggctgtgacttgctggctgccacagcctccccaccagttttccactttaagggaaaaaggcctcccatgctccttcatggttggatggcttttgggccccactgtgcccctgaaggctcagccctgcggccctcctcgctcatcagggcccttgggagggctccttgctgcaggcggctcgctctgggcagcagggagggctgggcaggcctggaaagccgcctgctggtgggcagggcgtgggcaccccagggccctccctggggctgggtgcagtgctccgcctcctgctggggcgatgtgacccctgccgtgttcctgagggcctcccttcctggcctgcccgtgtacaggtgtcccccaaggagctgcagctcatggtcagctcacccatagggcagctccacttccacctgctgtctgcaggggagcccttcttatgacaattctactgctaaaacttttcaaataaatacttcaaatgcttgaaaaccactgatctaatctaagctcctgcttcctaaaatccatgtgaccatgaggctgccttgacgcagggttccaggccattccccataccccacccagccccaacgccttgcacctgtgtccggccaggcagctgccagcccatttctgtggctggggtgccccgtgcctgctctgcccacatgccctgccttatgtttgggcaccgagacctcacctggcctcttaagtgaactacaggtgctcctagccccctcagaggtacttaaccccttctctaaatttccatcagacttggaacgcgatttagtgagccagggtcggttaggtgagctggggtctctggcgtgaggcttaactcctgcccccagacaggggagcagcagggctgagccgtggaggaaggtccccccaccgggcagctgccctggccccgctgtggcctgtcaggagtcctcagcaggggtgcctctgaggactctgtgaggaatgcatggggagggtgtggatggtgccagggacagcagtggaggcccctcccatgaccctgggcaccacctggtattggtccttgcttcagcggagccagcatatcaggggtccctagagcctggcagctgagaccagcctcagccaggtttggggttgagaatctaccctcaccagcaggggcatgaaaactgtcccgctgggtgggaggccatgacagtcagcacgggcctggcagatgggcggcaccgtggttttacacactgctggtgccaggcctggcctcacagggagcaggcaggcactgtggagggtaccagtcatcaccacaggagcctgtcacccccgcaggcgtgtccacgcacacacgccacatgcacagttcaggggcccacgagggcaggctctggctggcaccggcctggccagctgcgccatgtcaagatgccccacgaggcggcccaggcctctgcctgatcttgatctgaggctgtggaggggtttccctagtgtcccatggactgactgtgtctctctgtccccacccgcccctgcagtacgagtacagcttccgcacagagcagagcgcagccgccaggctcccgcccagccccaccaggtgtcagcagatcccgcagtcctgaggagccagcggccacctgcggggagaccaccgccgcccagactactgacggcaggggctgctgcccccgcctcctcctgccgcctccgccagccctccctcccacactgccccagcagggctggcccggagactgggcagctaagtgggcgcatcctgtcttcagctggcctgactgacaccccggcctccctggggacattgttcataaccatgactaatctgtgtgtgctgtagtgaccagcggctcctaacgtgtctgtgtgatgaccagttgtcctccaaaaacctcactcaccacggagtcaccctgagggccccgggcagttgccctggccgcccagtgacgcccaccggctccctccgctccctcctgtcacctaccagggcagaccccactaagccgttgagtctcttcctggaagaccctgagggccggcagctttgcctaggactctccagggtcgctgatcctccccggcccagggctgccaggaacaagttcctctctgcaggatctcacagcagccctgagaagacatgggaggaagaagccagtggccctggggtggaccctgccctttggacatcccatggacttgtcacccagtcgcctggaagtcggggagcagcacccctgcccccggtggaggggttgttgctttctggggaggaggacggttgacggccctgcttggatccaccaccaggacgctgtgctcggccatggcgcgcctcccccaagggctcatctgtgcaacaaccacatgccaacaatagctccaggtgcctcagccccgtgccctgacccggggaccacagggacaccctctgagacgtgctggccccaggaggatacaggcacacgggcacccagcccctctcagagccaggcgtgtcttgacggtatctgctgacgggaacaagtcattctgaaaggtccctctgacccaggtcaccaaatttgggccagaactggcacttccgagtgcccactggtgctggcgtcctcaaagtgccgggcgccaagttcagccccaggtgcgtttgcctaggcagtggtggctgccatccctcggggcccaggccctcacccgaagggctgcctcactctgtggtgtcaggcactgggctgtgtcctgattcctcagagtatggggacctgacatctttgggtccccaagagttggctcttggatgtggaggcttgatgctgcggttgggggctgcactacctgcgtccgtggaagcctctgcctcagcggggacggcctcctgctgcaggtcctgggcagcccacagtagtgctagctgaggcccagaggaacgggaggaaagggaggcagcgccggacggcgcagctggccaagaggcgggcggggccagaaatacctcatgcccctgcaccagcccctccgtctccaggccccaggcctctttgtggacccatcttcctcctctgccaccccgatcttcactcggatacctcttgatttctgtggataagggaagcggccacttctccctccctgagacccgaggatgcccctggtgggggtggccttctcaggactcctgggtggcacagcagcaggaccttgtcatgggactgatgctgagcagggagggggctgccaggctggctgccgatgctccgttcacataagccagtgtggttctggggacctgaggagccctgtggcacccacagggggcacctatgtctgccgtggctcctcgggtggtgccctgtgtgacaaagcccaacagcaagggtgactcctggcaggtgggggcagcaggagggcagagggcagagctctggccacttctgcccacttcattagggtttgtgaactttgtccttcacctcttttcgtgccctggttgtgagattgcctctaacaggtaatgccaggggcccttcactccgcccccatgactgggaagaggcctgtggcagcgccgctggaccctaggaggctcagaggcagtggtgtgggagccctgtctgcaaggacgcagaataagcagtgagggcggctgcaggagaggaaggggctcccacagcccccactgatgccgctgcaggcccctgtcgagctggggtcccagccaggtgcccccgcatgccctcctgcagttgctggatggatagggacaccaggaagaggacaaactgcatggactcaagcgagctggagccatcttctccatagcattacggacttagcataagagtaaatgactgtgaacgttgtagtaaacggcagcttaagataagtaagcagagacagtgttaaggacgagttggtgtctgtggtagcttttaggctgctcctaacccaccatttattgccttctgagaggtgggtgaggacaagcatgtgcctgtgtgtgtgtgtgtgtgtgtgtgtatatgtgtgtgtgtgcacgcacatgcgtgtgtataagcccacctgagtggggctcgtgcaggagaactgaggcatgaaactctggctcaaacctaggaattgagagcgtttctgtcttttgggagagtacttttctccacgagccctctggccactgtgggagggaaggacaagggttcccttggaaatgtgaagggtcttggcctcatccctcaggtccccccacagcacttcccactactgcttctgtccctgctggcagcctctgtccctccagaacggctaaccagagcacactgtccccaccgcctcccctttctctctggaaagttgaagtatctccaaaggccttggaaatggcacaaaggtgataaggagcaggtgctttgctgcagtctcccttgcaaatgtataattaaggcctttcttcccaccccaagtccaagaacaaatgccagccacgtcctccgccacttggagagatgagaacccagtggggtcacgtaaaggaattgcaggtcggtgagaggacaagagggactcccatgttctaagcacctgttcctggccaggctctaggccaggctctctaagcacatttctcctttcattccccctaaaaacagagtgacctggaagtagatgttctttgctccttgtcagagttgaagaggctgacttggcccactgctaagcggcagaggcagggccagccatcctgtcgcaagcccgtgctggggctgccctttctgtttccagtccagttacggacttcccggccgccactgggccctgccggtcaccaggccactgtgcagtgggcgcagagcatggtcaggagtggcctgcccgtactcctccacccagatgagggccctccagagcctgcaggcatctgtggggaatcccagcctgcaggttcttggagaagcaggtgaacctaaggatgaaagcaaaggagggccttgaggaagcagcccccaggcctggcagccacgcagcggctgagctcatgaacttggttcgcagcctgccttgcccctggaggccacgccaggcgctcacccctgagcccacagcccctgcttgggctgcctggcaccctcagggtggcccggcctcctcctgccactctgagcacatgtccgggggttgccaccagagacggctttgttctcccagctaaggccgtggagctgctgtgtgactgtgtcaggcctggacaaggaagacccttagggatgacgtccccgctgcatatttattcaaggtgactcttgtacttggcaagggaagtccactgtgtgattgtctgtattcttaatataatttgttaaataaacgtttgttttaacctctttccccagtttgctgtcgtggtgtctgaaggcagcagaggtcagtatccctcagggcaagccccaagctctctctcccccagcagggctcttgtcaccacctggcctgtcagccttctagaaaggactggtgggcttctttgccccttgcttagttgagacgacctggttacaagtcagtgggattccgggggatgcagaaagccccgctgttatctggtggcagccctcggggtgctcctggaaggagaaaagccccagttggcgtgaaggcaggagcagctcctgccaggtggccccggtggggagggccggggtgctcggtgcctttcacctccgactccccccagagcccttgtctgggggcgcagaccacgtcggagtctgggtggtttcaatcctgtcccgactgctcacctgcttgtgagaggccactccagacaccagctaaggaggctgcagggcccaggaacaggcgcagcgctccttgtgaggagccggcagttcaggtttcaccatcaaagctctttgcctcctcttagcatgctctgtgcgtctgggccagacaccagtctgcctgcagcccgttcacaccggactcgggcaggaaggagctggagcacagccaccttagctcagcgctcacctcaggggcaccagccccgcctcctccacatcccagacccctgctccgggatgtctcaggtctttgtcccacagtaggagaggaaaagcagcccggaggatcccataagagacccgtggtgcagatagaacagctgatgctgggttccagcgtgggccttgccacttcctgaccacgtggccttcgacaggtcacctgcaccctgtatctgtccaaagcgacacagttcccctccctcaatggcttgccctgggaagatggaatgaggacccaggcagggcatttagcacacagcagagacatttagcacgcacgtgccaggtctttctgggggggccttgattctatgttactgtccacaaaacgtacagagtccctcctctatgctgggtctggagacaccaaggaagtacaggtggtggtctttggtatcgaggacaaggcctcaagtactgcttggaaagacagagcaatgcccagggccccagggctgcaaggagctgaaatctactacactggcctaagccaaggcagtagtgaccagcccaggaggaggcccatggtgcccaaggcaggtgcagcccagcctcagagggccagcctggcagcccctgttcatcctctgcacttcccacgggccccatggcacctgagccgacgtctccccctgcgcttccagctgctggttcccagcctgaccaccatctcaaccctaacgttccggggctttctcttcccatctgcgtccccgccggcagctccctgcagcctttctctgtgcttagctctgtcgctggtcagtcactccaagctccagccacatagttccagcagccacctagaggtgtccatgtggaggtcccatactcacgttgacctcagcacatgccgagctgaatgaaccatcctatctcaagccctaaacggcccctcctcctccaaccctcccatctctgggatagctccaccatctccccctagagttagccacggcccccacctggagccctttgggatcgctccatctgcagctggacagttctgtcatctaactgttttcaaacccggccactacattctcttgttgctgctgtggtattatcagttctggcctcaagccctctcaattggatcgcagcatcagcctcctagccacacctgcctcccacatcaccctgtcccctgtcattcatcccccacacagcccagatccagccaacaggactcctccacttactctgccctcatcaccctaggaatgaatgctgagtccccaccattctgtgcccctccctcctgggcctggctcacctcccactgatgcccctgctgaattatttgcagcttcccaaacccttacctctcatatgcctccctacctttgcacatgctattccctctgcctagaatgcttttctcccatttttctacctggaaaactcctactcatccttcaagaccctgttcctgcacctcctctgtgatgtccatccggatgtcttggaggcaaaggtaatcaatgattctcctgttcaagctgcctgtgccttgcacaggggaccacatgtcgctgcattgcagccacctgtacctctcattagattatgtgctcctggaagaaggggtccatgtctctttttttttttttttttttttttttttttttttttttgaggtagagtctcactctgtcgcctaggctagagtgcagtggcgcaatctcggctcactgcaacatccgcctcccgggttcaagcgattcttcttctgcctcagcctcccaagtagctgggactacagacacccaccaccacacctggctaatttttgtatttttagtagagatggggtttcaccatattggccaggctgacctcaaactcctgacctggtgatccacctgcctcagcctcccaaagtgctgggattacaggcgtgagccaccacgtccagccccatgtctcatttattatgccctcccccaccattgtatacccagagtgcccagcacaggcctggaaaaatggtggacatcagcaaatgctctctgaatgaattccttacactggatgaagtagacagatgaactagactcaattgctgaggagccccagaaggacagacaccagcaatacagggcctgtgatgcccagcggcaggcctccctggacacaccccgatgctggccccagagagatcagacaaggatatgaaagctgagccttgtctggttcatctccgaagctgcaggacccaacacggggcctggctgcaagctggcatcagtccatggtgatgatggtgggacaggaaggtgaactgccaccggctgctgtgtctctttctagaacccagctctgggggatgtcagagaaagggaggaggtagatgggtcacaagacccaacactaaaatggccaggggcttggatctcagggactggagaacttcagagataagttgattccaaatagatatggataatgcacataaaaaaaaattaggagcatggcttgcttcatgaacatgggcatcagaagcctcaataaagtctttttttttttttttttttgagatggagtttatctcttgttgcctaggctggagtgcattggcgtgatctcggctcactgcatgcaacctccgcctcctgggtttaagcaattctgcagcctcagcctcctgagtagctaggatttcaggtgcctgccacctcatctagctaattttgtatttttagtagagatttaccatgttggccaggctgttctcgaactcctgacctcacgtgatccacccgccttggcctcccaaagtgctgggattacaagcatgagccactgtgcctggccaagaagcctcaataaagtcttgagcagagtgaaaggtggttgggtgcctagacgacagatggcagaggtcagttttctggctatgcccattcatcccttccacgttgccctaggtgggtcattttcatccatttgcaggttggggaggggtgtcagcagagggcagcacaggcgggcagctgcctggccctgagccccctcctcccctcgccccacaccttgggtcatgttgctgcagagacacaggtcttgggaatggtggtgcgggggcagaggtctgggaaggccctgagggctggactcctgatggggagggcacatgggcagaggttggcacagtttggaacacccaagacacatccatccccagctcctcatccttctctggagcgggcacagggttctcaacttcagctgcacattagaaccttctgagagtgggttagaattcctgtgcccagacccacacccagaccaatcaaacaagaatctctctctgcaggagggaccaaggagtcagtagtgttcaagcttcccaggtgatttcaatgtgcagctgagagtaagaactcaattctggccggactcggtggctcacgcctgtgatcccagcactttgggaagctgaggcgggtggatcacgaggtcaggagttcaagaccagcctggccaagatggtgaaaccccatctctactaaaaatacaaaaattagccgggcacagtggcaggtgcctgtaatcccagctactcgggaggctgaggcaggagaattgcttgaacccaggaagcagaggttgcagtgagccgagattgcaccactgtactctagcctgggcaacagagcaagactccatctcaaaaaaaaaaaaaaaaaaaaaaaaacaacaacaactcaattctgagctttcaccacttccccagttacatgttaccagccagtggagctgagtcccagggaactatgaattcccaggggcaggtggaagaacagacatcagaagagctcatccacccagggaagacaaaaagctgagcaacccacaccagcagaagcagaagtcatagaccagccagagcatgagttaaatataaacaaaaggcatcctccaagagatgtgggaggaccctgggaacattgggcagggagaagttgtttggaataagagcctgtcagttttgaaatactgacagacctagagagacaaaaacagataagccagtaattgcacttgaagattttaacacacctctctcagaaactgtagtcaaattgccaaaatatgagcaaagatataaaatgtttgaataacctgattaacaagcagagaactttcaacctggcatagatcccatatcctttcagaatcaactaagaactaagccactaaacaaacctcaataatttccaaagagccaacgtcatatctaaaaccatctctgatcatacaatgaaaaaataagaaatgtaaagcaaaatgatagctttttaaaaccacacatgattggaaaatgcactacaattaaataagaggaagccataagggaaattattaacatcttagaggaaaataataatgaaatcactacatatcaaaatttgtgggaggccaagcatggtggttcacatgtactgtaatcccagtactccaggaggccaaggcaggaggatcagttgaggccaggagtttgagaccagcctgggcaacatagtgagatcctgtctctacaaaaaaattcaaaaaaaaaaaaatagccaggcatggtggtgtgctcctgtagtaccagctacttggaaggctgaggcaggaggactgcttaagcccaggagttttaggttacagtgagctatgattgcaccactgcactccactctcctggatgacagaaaccccatctctaaaaaataaaaataaaaaaattgtgggacacgattgaaacggtagacaatgaaatttacagtttaaatttatccaaaagcaagaaagattgaacataaacaagctacgcttttaactgaagaagataggaaaagagcaacaagtaagtgcaaagaaataggaaataatgataaaaagaatcgatgaaatcaagcaaacagaaattatgaacaaagtcaaaatttggttctttgaaaagactaaaagagacaaacttcagacaaggagaaagaagaggcaaataagaattaaaacaaaagataactgcagatataacagttaacaggaatattattagtaaccatgtattaattaccatatatctggaaaaatataaaatgtcaaaattggtataagaaaactaaataccctggcacagtggctcacacctgtaatcccgacactttgggaggctgaggtgggtggatcacctgaggttgggagttcgagaccagcttgaccaacatggagaaaccccgtctctactaaaaatacaaaattagctgggcgtggtggccatgcctgtaatccccgctactcgggaggctaaggcaggagaatcgcttgaacctgggaggcagaggttgtggtaagccaagatcgcgacattgcactccagcctgggcaacaagagcgaaactccgtctcaaaaaaaaaaaaaaaaaaaaaaaaaaacatagtccaattttcaaccttttcctctatgatcgttctttctgtgtctcgtttaaaaatctttgcctatcctcccaaaccctttaaaaaaaatgtttggctttttttcctgccagtaccttccctggaagatgagtgaggaagggtttctggaggaggcaaggtatgccctgagctctagagggggctggactaggatgtgtttcccagggaaggtaagcaaatgtcaaggggggaggtatttcattgttcactgggcatcagcaaacgtttacagaggacagcaggggtagccttctgtgtgtcatcaccacagtcctgaagttagggatggcccatttagcagataaggaaactgaggctccagagagtgctcagaagcacacagtcagacaggggcacctcagggcctccagcccaggcatgtccaactccagtgccgctcctggcgcggcctggattatgcacacctggaaggaggtgtcctgtcctgtggggttaaggtgaggatggctcatgaggtgagacaggcccagttcagggcccagcttagtcacctcccttgatgtgcccctggggctctgggataacagcagccagcagcaaccagggctttctggaggaggaattgagcaaacccattacatacttggcctggggcaaggcacacggcaggggtgggggatgcagcagagggcgtttggccacggggaagccccaccaggcccctccacgggcaggaagggagactgagggtctgaggtcgtgtgagcttcctccccctacctgtcccctggccttgtgcagagactcaggagcacgctagcaatctgcttccaggctaagcaccagccccagttagctcaagagagcttcccgctgaggaagagggatgatgtcgggccaggtctccagcaccccacctcactgactggggggcgctccctagggtgggtcctggcaggggccaagaccacctcacctcccgcaggcccaggaagaggcacttcgcagcgaggcaaagccccttggagttccattgcccagcgagagggccccaggaggtctctggcctgctttctcccctggaacccaagggttctggcacctccctttctaggttgcccagcagggtggacctccagagccgcctgcacgaggcccctcccaccgtgccgcccgcccgggaccccgccctgcgctccgcccccaaacacgggttctcacgcggtccggccgcgcgggggcgcccggctccccggccctcgctgggccctgcgggaacgccccggccgcgcactggggatgctcggaccccagcacacacgaggcggagctccgcggactggcggcaaatcaatccctcggcaccgcgctacggacgtgtgtttggaaggaggctagcccgccgcgcaagtccccgcagcgccccgccggcctcccaccccctgcggcgtccggacctcgtggacctggggtggctcccatagactgcggggccgggcccagccgcgctcgctttgctcgggaatgcgggtcgactggagaggcccgagcaagccccccagctccacccgcccctaaagggtgggcttgggcagtcacatcaggagcctcaacattcacatccggaaaatgggaaggtcaacagtccctcctttaaaaggtttctgagaaagttaaagatgtatcactattgcccagcttccagtccttaggcaagccacctgcgcccctccctgaacctcaacttcccccgctgtaaaatggggataagaaaagtcctcccctcagagggccattgtataatacgatgagcttggcccacgctgctgggcaccccctgagctctcagtaaatggagctattggggttatgcccgctcagcagaggccccacctgcagtcccaagcctgtgccccaaatcccacgggttgccatttagggacccaggccccccagtttgggagctggtggcttagagtgggtgctccctccagtccctggctggagtgggggactcgctgtgcagccacaggtgtctgggcaggaggcttggcggcagtgcccctcccctggctgcccttcagggcccgctctggttgagccacacggcaaaaacactccgctttttgacaccatccagaaaatgaaaatgtcccaggcgcctaatccttcccttccttttggcaacttaaactgccctgaaacacagccaacatattgaacgcagtgtgagcgtccacgccagagtgtaggcctcccgcaaagccagccttggggactcgtggagcaaagcctcgttcctctgtcagactctgccttactaggtacggagtgaccctggcccccaccagccggcatctcagccgccttcaaacccgccgacctgaggggcacgccagcaactctgacttccttcccagccagggctgtgccgcccccactcccccccagaaaaatatttgaaatggtctttgactgaaatgagattaatcctcagttccctgacagtgtctttgggcatgtgtttttataacctccctttcaaatgagaaccatttgtcgccgggaagctggggaggccctgccccaactgctgggccagacatcaccggcacctgattgaatgtcacggacagtgcgaggggtcagggctgaggtgagggccgtgtactcagggccaactgtcctctgctggtctctggctaggtccccatctccagccagtggcgtaaactagaggatatgaattccaacctggattccccttaccaccacaatatgcccttgagccggtggctttgcctctctgagcctcacttttctcatctgtaaaatgggggagatgatggtcccgtcactcaggtgatagacacagcctagtgcctgaagacaatccacacttgatgtttgcaaggcttttgaacacaacctcagctccctcagaactcctggtgggagggcagagtacccccaggctggggccttccaagggccgcaaacgttcattctaaatgtggttcgagtctcctactcttccagacttggctctaaatgagaggccatgtcggcaaagaagccgagttgctgatgcttgcctagggagagagctgtgcgtagaggtgccaccatgcaggctaattaactctgagccctggctcggtggcctcctctcccggcacaatcccccgccacccccaccactccaggtcctgtttgaagtctgcaacaccccccccccaccgccccccttcctgccgtccctgcttgctgaagcaactacagccccttagggctcagctgggagggatttattggagaatttcaatcatggggtcttggctcaaacttgttgcttcctcaaaaatctccccagaagttgactacatgtgaaactgaggcatgaaggaaggactcggatgatctcagggttcggaactccacctgggcctgtcagagaattcatagaccctcacttggaggaagagagcacagaacagcaagaaagatgcaggttcctgggacgatgtggaggtaccgggcttggttcacttttaaggagctgcttagaaatagtgtttcagctttgaccaccactcccgcccccaaccatgacacttgagtgcaggtgtctgatctctgcggtgtaagcccgctattggtcttagggtgggaaagtgtgggatggaatcctggttgagagtcctgaatggtagaataagggaccaaagccatgctgatgtgccatttttcttaaactgtgtggcttccctccccaaagacattccctgggcagctttcaggctaaggagcccacgcccttccacgggagcccagccaagaagggcccgggacagaggctccatgcatgcttcattttccttcccctctg

SEQ ID NO: 1218 - DNA, 4506 bp, Homo sapiens
cggtgaggctcgcgctcgagctgcggcgccggctcctgccgcctgggccccgggcccggcccctcccgcgccgcccgggcgatgagaagctgcttctgcgtgagacggagccgggacccgccgccgccgcagccaccgccgccgccgccccagcggggaacagaccagtccaccatgcctgaagtcaaagacctctcagaagccttgccagaaacgtcaatggatcccatcacgggagtcggggtggtggcttctcggaaccgagccccgacaggctatgacgtagttgcacagacagcagatggtgtggatgctgacctctggaaagacggcttatttaaatccaaggttaccagatacctgtgtttcacaagatcattttccaaagaaaatagtcatctggggaacgtgttagtagatatgaagctcattgacatcaaggacacactgcctgtgggcttcatcccaattcaggagacggtggacacacaggaagtggcttttaggaagaagaggctgtgcattaaatttattccacgggattcaacggaagctgcgatttgtgacattcggatcatgggccggaccaagcaggccccgcctcagtacacgtttattggggaactgaacagcatggggatctggtatcgaatgggcagagtaccaagaaatcatgactcatctcaacccacaacgccttcccagtcatcagctgcctccaccccagcccccaaccttcccaggcacatctccctaacacttcctgccaccttccgaggcaggaacagcacccggacggactacgagtaccagcactccaatttgtatgccatatcagcaatggatggtgtgccttttatgatttcagagaagttttcttgtgttccagaaagtatgcagccctttgatctcctgggaatcaccatcaaatctctagcagaaatcgaaaaagagtacgagtacagcttccgcacagagcagagcgcagccgccaggctcccgcccagccccaccaggtgtcagcagatcccgcagtcctgaggagccagcggccacctgcggggagaccaccgccgcccagactactgacggcaggggctgctgcccccgcctcctcctgccgcctccgccagccctccctcccacactgccccagcagggctggcccggagactgggcagctaagtgggcgcatcctgtcttcagctggcctgactgacaccccggcctccctggggacattgttcataaccatgactaatctgtgtgtgctgtagtgaccagcggctcctaacgtgtctgtgtgatgaccagttgtcctccaaaaacctcactcaccacggagtcaccctgagggccccgggcagttgccctggccgcccagtgacgcccaccggctccctccgctccctcctgtcacctaccagggcagaccccactaagccgttgagtctcttcctggaagaccctgagggccggcagctttgcctaggactctccagggtcgctgatcctccccggcccagggctgccaggaacaagttcctctctgcaggatctcacagcagccctgagaagacatgggaggaagaagccagtggccctggggtggaccctgccctttggacatcccatggacttgtcacccagtcgcctggaagtcggggagcagcacccctgcccccggtggaggggttgttgctttctggggaggaggacggttgacggccctgcttggatccaccaccaggacgctgtgctcggccatggcgcgcctcccccaagggctcatctgtgcaacaaccacatgccaacaatagctccaggtgcctcagccccgtgccctgacccggggaccacagggacaccctctgagacgtgctggccccaggaggatacaggcacacgggcacccagcccctctcagagccaggcgtgtcttgacggtatctgctgacgggaacaagtcattctgaaaggtccctctgacccaggtcaccaaatttgggccagaactggcacttccgagtgcccactggtgctggcgtcctcaaagtgccgggcgccaagttcagccccaggtgcgtttgcctaggcagtggtggctgccatccctcggggcccaggccctcacccgaagggctgcctcactctgtggtgtcaggcactgggctgtgtcctgattcctcagagtatggggacctgacatctttgggtccccaagagttggctcttggatgtggaggcttgatgctgcggttgggggctgcactacctgcgtccgtggaagcctctgcctcagcggggacggcctcctgctgcaggtcctgggcagcccacagtagtgctagctgaggcccagaggaacgggaggaaagggaggcagcgccggacggcgcagctggccaagaggcgggcggggccagaaatacctcatgcccctgcaccagcccctccgtctccaggccccaggcctctttgtggacccatcttcctcctctgccaccccgatcttcactcggatacctcttgatttctgtggataagggaagcggccacttctccctccctgagacccgaggatgcccctggtgggggtggccttctcaggactcctgggtggcacagcagcaggaccttgtcatgggactgatgctgagcagggagggggctgccaggctggctgccgatgctccgttcacataagccagtgtggttctggggacctgaggagccctgtggcacccacagggggcacctatgtctgccgtggctcctcgggtggtgccctgtgtgacaaagcccaacagcaagggtgactcctggcaggtgggggcagcaggagggcagagggcagagctctggccacttctgcccacttcattagggtttgtgaactttgtccttcacctcttttcgtgccctggttgtgagattgcctctaacaggtaatgccaggggcccttcactccgcccccatgactgggaagaggcctgtggcagcgccgctggaccctaggaggctcagaggcagtggtgtgggagccctgtctgcaaggacgcagaataagcagtgagggcggctgcaggagaggaaggggctcccacagtgcccccgcatgccctcctgcagttgctggatggatagggacaccaggaagaggacaaactgcatggactcaagcgagctggagccatcttctccatagcattacggacttagcataagagtaaatgactgtgaacgttgtagtaaacggcagcttaagataagtaagcagagacagtgttaaggacgagttggtgtctgtggtagcttttaggctgctcctaacccaccatttattgccttctgagaggtgggtgaggacaagcatgtgcctgtgtgtgtgtgtgtgtgtgtgtgtatatgtgtgtgtgtgcacgcacatgcgtgtgtataagcccacctgagtggggctcgtgcaggagaactgaggcatgaaactctggctcaaacctaggaattgagagcgtttctgtcttttgggagagtacttttctccacgagccctctggccactgtgggagggaaggacaagggttcccttggaaatgtgaagggtcttggcctcatccctcaggtccccccacagcacttcccactactgcttctgtccctgctggcagcctctgtccctccagaacggctaaccagagcacactgtccccaccgcctcccctttctctctggaaagttgaagtatctccaaaggccttggaaatggcacaaaggtgataaggagcaggtgctttgctgcagtctcccttgcaaatgtataattaaggcctttcttcccaccccaagtccaagaacaaatgccagccacgtcctccgccacttggagagatgagaacccagtggggtcacgtaaaggaattgcaggtcggtgagaggacaagagggactcccatgttctaagcacctgttcctggccaggctctaggccaggctctctaagcacatttctcctttcattccccctaaaaacagagtgacctggaagtagatgttctttgctccttgtcagagttgaagaggctgacttggcccactgctaagcggcagaggcagggccagccatcctgtcgcaagcccgtgctggggctgccctttctgtttccagtccagttacggacttcccggccgccactgggccctgccggtcaccaggccactgtgcagtgggcgcagagcatggtcaggagtggcctgcccgtactcctcctgccactctgagcacatgtccgggggttgccaccagagacggctttgttctcccagctaaggccgtggagctgctgtgtgactgtgtcaggcctggacaaggaagacccttagggatgacgtccccgctgcatatttattcaaggtgactcttgtacttggcaagggaagtccactgtgtgattgtctgtattcttaatataatttgttaaataaacgtttgttttaacctctttccc

SEQ ID NO: 1219 - protein, 317 aa, Homo sapiens
MRSCFCVRRSRDPPPPQPPPPPPQRGTDQSTMPEVKDLSEALPETSMDPITGVGVVASRNRAPTGYDVVAQTADGVDADLWKDGLFKSKVTRYLCFTRSFSKENSHLGNVLVDMKLIDIKDTLPVGFIPIQETVDTQEVAFRKKRLCIKFIPRDSTEAAICDIRIMGRTKQAPPQYTFIGELNSMGIWYRMGRVPRNHDSSQPTTPSQSSAASTPAPNLPRHLTLPATFRGRNSTRTDYEYQHSNLYAISAMDGVPFMISEKFSCVPESMQPFDLLGITIKSLAEIEKEYEYSFRTEQSAAARLPPSPTRCQQIPQS

SEQ ID NO: 1220 - DNA, 4817 bp, Homo sapiens
cggtgaggctcgcgctcgagctgcggcgccggctcctgccgcctgggccccgggcccggcccctcccgcgccgcccgggcgatgagaagctgcttctgcgtgagacggagccgggacccgccgccgccgcagccaccgccgccgccgccccagcggggaacagaccagtccaccatgcctgaagtcaaagacctctcagaagccttgccagaaacgtcaatggatcccatcacgggagtcggggtggtggcttctcggaaccgagccccgacaggctatgacgtagttgcacagacagcagatggtgtggatgctgacctctggaaagacggcttatttaaatccaaggttaccagatacctgtgtttcacaagatcattttccaaagaaaatagtcatctggggaacgtgttagtagatatgaagctcattgacatcaaggacacactgcctgtgggcttcatcccaattcaggagacggtggacacacaggaagtggcttttaggaagaagaggctgtgcattaaatttattccacgggattcaacggaagctgcgatttgtgacattcggatcatgggccggaccaagcaggccccgcctcagtacacgtttattggggaactgaacagcatggggatctggtatcgaatgggcagagtaccaagaaatcatgactcatctcaacccacaacgccttcccagtcatcagctgcctccaccccagcccccaaccttcccaggcacatctccctaacacttcctgccaccttccgaggcaggaacagcacccggacggactacgagtaccagcactccaatttgtatgccatatcagcaatggatggtgtgccttttatgatttcagagaagttttcttgtgttccagaaagtatgcagccctttgatctcctgggaatcaccatcaaatctctagcagaaatcgaaaaagagtacgagtacagcttccgcacagagcagagcgcagccgccaggctcccgcccagccccaccaggtgtcagcagatcccgcagtcctgaggagccagcggccacctgcggggagaccaccgccgcccagactactgacggcaggggctgctgcccccgcctcctcctgccgcctccgccagccctccctcccacactgccccagcagggctggcccggagactgggcagctaagtgggcgcatcctgtcttcagctggcctgactgacaccccggcctccctggggacattgttcataaccatgactaatctgtgtgtgctgtagtgaccagcggctcctaacgtgtctgtgtgatgaccagttgtcctccaaaaacctcactcaccacggagtcaccctgagggccccgggcagttgccctggccgcccagtgacgcccaccggctccctccgctccctcctgtcacctaccagggcagaccccactaagccgttgagtctcttcctggaagaccctgagggccggcagctttgcctaggactctccagggtcgctgatcctccccggcccagggctgccaggaacaagttcctctctgcaggatctcacagcagccctgagaagacatgggaggaagaagccagtggccctggggtggaccctgccctttggacatcccatggacttgtcacccagtcgcctggaagtcggggagcagcacccctgcccccggtggaggggttgttgctttctggggaggaggacggttgacggccctgcttggatccaccaccaggacgctgtgctcggccatggcgcgcctcccccaagggctcatctgtgcaacaaccacatgccaacaatagctccaggtgcctcagccccgtgccctgacccggggaccacagggacaccctctgagacgtgctggccccaggaggatacaggcacacgggcacccagcccctctcagagccaggcgtgtcttgacggtatctgctgacgggaacaagtcattctgaaaggtccctctgacccaggtcaccaaatttgggccagaactggcacttccgagtgcccactggtgctggcgtcctcaaagtgccgggcgccaagttcagccccaggtgcgtttgcctaggcagtggtggctgccatccctcggggcccaggccctcacccgaagggctgcctcactctgtggtgtcaggcactgggctgtgtcctgattcctcagagtatggggacctgacatctttgggtccccaagagttggctcttggatgtggaggcttgatgctgcggttgggggctgcactacctgcgtccgtggaagcctctgcctcagcggggacggcctcctgctgcaggtcctgggcagcccacagtagtgctagctgaggcccagaggaacgggaggaaagggaggcagcgccggacggcgcagctggccaagaggcgggcggggccagaaatacctcatgcccctgcaccagcccctccgtctccaggccccaggcctctttgtggacccatcttcctcctctgccaccccgatcttcactcggatacctcttgatttctgtggataagggaagcggccacttctccctccctgagacccgaggatgcccctggtgggggtggccttctcaggactcctgggtggcacagcagcaggaccttgtcatgggactgatgctgagcagggagggggctgccaggctggctgccgatgctccgttcacataagccagtgtggttctggggacctgaggagccctgtggcacccacagggggcacctatgtctgccgtggctcctcgggtggtgccctgtgtgacaaagcccaacagcaagggtgactcctggcaggtgggggcagcaggagggcagagggcagagctctggccacttctgcccacttcattagggtttgtgaactttgtccttcacctcttttcgtgccctggttgtgagattgcctctaacaggtaatgccaggggcccttcactccgcccccatgactgggaagaggcctgtggcagcgccgctggaccctaggaggctcagaggcagtggtgtgggagccctgtctgcaaggacgcagaataagcagtgagggcggctgcaggagaggaaggggctcccacagcccccactgatgccgctgcaggcccctgtcgagctggggtcccagccaggtgcccccgcatgccctcctgcagttgctggatggatagggacaccaggaagaggacaaactgcatggactcaagcgagctggagccatcttctccatagcattacggacttagcataagagtaaatgactgtgaacgttgtagtaaacggcagcttaagataagtaagcagagacagtgttaaggacgagttggtgtctgtggtagcttttaggctgctcctaacccaccatttattgccttctgagaggtgggtgaggacaagcatgtgcctgtgtgtgtgtgtgtgtgtgtgtgtatatgtgtgtgtgtgcacgcacatgcgtgtgtataagcccacctgagtggggctcgtgcaggagaactgaggcatgaaactctggctcaaacctaggaattgagagcgtttctgtcttttgggagagtacttttctccacgagccctctggccactgtgggagggaaggacaagggttcccttggaaatgtgaagggtcttggcctcatccctcaggtccccccacagcacttcccactactgcttctgtccctgctggcagcctctgtccctccagaacggctaaccagagcacactgtccccaccgcctcccctttctctctggaaagttgaagtatctccaaaggccttggaaatggcacaaaggtgataaggagcaggtgctttgctgcagtctcccttgcaaatgtataattaaggcctttcttcccaccccaagtccaagaacaaatgccagccacgtcctccgccacttggagagatgagaacccagtggggtcacgtaaaggaattgcaggtcggtgagaggacaagagggactcccatgttctaagcacctgttcctggccaggctctaggccaggctctctaagcacatttctcctttcattccccctaaaaacagagtgacctggaagtagatgttctttgctccttgtcagagttgaagaggctgacttggcccactgctaagcggcagaggcagggccagccatcctgtcgcaagcccgtgctggggctgccctttctgtttccagtccagttacggacttcccggccgccactgggccctgccggtcaccaggccactgtgcagtgggcgcagagcatggtcaggagtggcctgcccgtactcctccacccagatgagggccctccagagcctgcaggcatctgtggggaatcccagcctgcaggttcttggagaagcaggtgaacctaaggatgaaagcaaaggagggccttgaggaagcagcccccaggcctggcagccacgcagcggctgagctcatgaacttggttcgcagcctgccttgcccctggaggccacgccaggcgctcacccctgagcccacagcccctgcttgggctgcctggcaccctcagggtggcccggcctcctcctgccactctgagcacatgtccgggggttgccaccagagacggctttgttctcccagctaaggccgtggagctgctgtgtgactgtgtcaggcctggacaaggaagacccttagggatgacgtccccgctgcatatttattcaaggtgactcttgtacttggcaagggaagtccactgtgtgattgtctgtattcttaatataatttgttaaataaacgtttgttttaacctctt

SEQ ID NO: 1221 - protein, 317 aa, Homo sapiens; identical to SEQ ID NO: 1219

SEQ ID NO: 1222 - DNA, 89285 bp, Mus musculus
  misc_feature (1)...(89285): n = A, C, G or T/U
acaacaacaacaacaacaacaacaacaaatcacaactgcatctgacctgagtagtaaaaactggagtgagactacacagaagagaattacatatgaacctcagaggactcagacattgagtcatttaggggccccaacagataggggtgcacccatcacccaagctgagaattattgcaggcaactgccaacactataatatttttaagttatactgttgtattttaatttataacttaaatgatacaagttcgaggaaagctcttctgcctgtcacaccctcacttcgggccactgagtaagagctcaatgggcagttatcgaaccaagcaatttatccatgaagtgattgattcccatgttgctcatgagatgctttgtcactgtttccgaaaaagtgaggagctgccttccagtaagggccaccgcgacactgtacaaagaattcagaatatttctctgcatgtaccatgggagcccgggttctgacctgagttccctcaatactgcttgtttgcttgtttgtttttgaagagagaaagaaggatctgaagttagacggggggaggatctaggagaaattggggaaggtgaaaaattatggtcaaaacattttttgaaatgcaaaataaactaagtaaaaaaagagctggtccccaagtaaccgtggcttaactgtaacaaaaaacacaatgaaactaagaaccaaacataaatgaacaaaacaaaaacaacaaagtgtgtgtgtgtgtgtgtgtgtgtgtgtgtgtgtgtgtgtgtgtgtgcgcgcgtgcatgcacatgtgtgcacacttgggcatgtagtctttggttaagtttttgttgagtagtattgtgagtaatagctctgtccttacaggcaggggtggtccaacagctgccgtgggttagccactcactgactctaactgggcaggactttctcattcagatgtgtgtctcagaggaaccaaaaaggtcagattcacacactctaacggacatcaatcctcacagctcacacacaccacacagcaaagattctctgcttcacttacgtttgttcctgtccccaactttgttcaaggaagatcagaaacagaagtgttccccaaaagcccatagcttgagacggtatcaaaaccatatctgtcacctctttgaggctactttgcatgtaagtaaagagaacctgaaattcggggatcaactaggtcgtgttaattattaacacaaggagaagggatcaccacatatgacaactgaaatcagaacagaacaaccatttcaagcccaggaacacaggcagcagcaggtattgtgtaggatttcgcatcaggacacttacttcaattaacgcagaatgaggactcagccatgggagcctggccctgtgaagacaggcttagtgctagaaggcaggagtctcattgcctttggctttctcttcaggtcattggctctgatgctctggcactgctcagcacacttgtgacaaatacctgaaacaatttaaaggaggagagagaattatgtcactaacagagtctgcggtctcagctcatggccacttgtcctcactgcttctggcccagacacagtgagccacacaggaacagtgggtagcatgctttggagcaccctctcctcgtaacttacaggtgagccgatgacagacaaggaccagatctctcaaaggcgtgtctctggtcatctacttctataaataagcccatctcttaagtccttgccacttcccagtaaggccatcaaactctgaccccatagtggaatcactcattgataggccagagcactcacagtccagttgctcccatgaaagagctggtctttgctagtttgtagattcttctttttccatcctttatttttcctccattcccggtttcaccctttaacactacataggagagatacaaggagataggggagagagaaattagaaaaaaaaaatcactgaatttaatttctttccttttgtttcttctttgaccatgcctgctaacaaacagcaaccaacctgactctagatgtcctcacatttatgtaccctctgaaaagttcccagaattctgaatgtcacacaattgcagaaactatctgtagctggcaagaccatgtttctgctagagcacgaggcaaatgatagtcagctgctgtggacagtccgaagcagccccatatcccacatctgggattaaaatgaaaacacattcttatatttctgtgtttttatagaaaccaaaattccaaaattgttgctacacacaacagctacaaagaagcctttaacatgtaagtgtctgttgtcgctgcagcttcaaaccttacatcttagtttgggttttactgctgtgaatagacaccatgaccaaagcaactcttataaaggcaaacatttaattggggctggtttacaggttctgaagttcagcccattatcatcatggtgggaagcatggcggtattcaggcagatatgggactgtaggagccaaaaggtctacagcttggtccaaaggcagacaggagaaggctgatttccaggcaaccaggaggagggtctcaaagcccacccccagagtgacacacttcctctaacaaggtcacatctcttctaataaggctacacttcctaatagtgccacttcccataggccaagcatattcagaccaccacaccttaataatatctgatgggatctacttagttctgatagtgacagaaacccacgtacatttgttttcatgctgacacgatttgaggatggctctgaattggacaaggctcacaaggcgatccctcttagagaacacctgagtggtagcatccttggtcctggaaatagtctacgaacaaccgacatcttccatggagggacaaggaatgcttcatcaattggcagcctagagaaggggcaatgcgcttaccatgtcaccttagtgatgatggcattactaagtaacccaaaagtttagtctttagcagggaatgcatatgctcccggacccaccctgggaatctgcattcattcagacacaatgtatttccttagcagggaatacacacacactcccacactgggaatcttcagttcattcagacacaatgcatttcgtttaaaaaatgtatacctttcaatggattttcacagctttcatgtaagaactgaagatgaagattcctgtaacaactgacactagttatttatatgtaaataaaaccacaggcaaatatattgggaaataaatgcatatgtagataaatatacaccttacctttaagatttttaattaaatctactttcataatgttttatattcaggagaaagtgttttagttatgtatttctttattactattctttctatctccctatatatctgctatttgcaagaaaacaaatgtctctaaacatattagtataaactgccagtgcttgtcaatgctgtgtcagcactatttaatttgcattcctaacatattccttaagaatttatacatacagatagtgtgttttaatcattttcatatcacactccaccctttcaggacctcctagacaagttccctatgctctattgcacatccttattttatatatattacatatattgcacatacattaatacacacatatatcatactgggcctagtttgtgctttccatatatgtatgggtgtggggctatccaccgaagcctggtcaacctatcaggggccacaccagttaagaagctgacaattcttccccggcagccaccaactgtcaaggcagctcagctacagcttaccaacatgtttatacttgttagagggataagagggcagagcagaagttgatgtgcaaatttctctgaaggtgtctcttacatgtgtcccggaagagatgtaaaccgaccaattatgtcttgaccacccagtgcattatctcagaaggacatctgtaaaatagttcagctgggttgtgaaagatgaatgtaatttaaacagagggcttttggcatcatttgggcaaaagtcaaaccatgtaagtgaaagccacaatgctaggcttcctttaaaggtgtctgtgatgtgctggtctcaagctgttagccagagaagggtaatttacaccgtttgttcgttttgtgtgcgagtttgtgcaaggactcacattatcaccaggagagaagcaaatgcagcggcaaacactggagccaaaacaactccgcaggtcaaatttcacactgctcccagagcttgtgtaacttagcacacaaacctttagcatcctcaaatattgcaactttcaaagttctttttttttcaacttgtgtcaaacagaagaaaaaatagttcaggtaaagtcaatgtttctggacacagcactcctgcaggggggtaatgattggttggtgggcttttgctatggacagctgtcctgggcacagcaggctgctgggaaaatctggccttcacacaatagatgtcagtagaaccttcggagcaataaaatcacccacccatactgccaaaggctcctgagggagaagggagggcagaggccccttgttggaaatctctgggttggtgtgtgcacagcttagaatttgtggagaatgaagcctgtgtccctattaaatatacagaacccagtaggctctttatgggagctgtttgaagtttccattgaaactcctcaccaccacatacatcctttacctgaacatcagtgggtctcaacctgagggtcgtgacctctttgggggttgaaggtcacaggggtctcttaagatcatcagaaaacagataattacattgcaattcataacagatgtgaaattacagttatgaactagcaacgaagataattctatggttgggggttaccacgccatgaggaactgcatgaaagggaaggttgagaacctctgctgtacctgcagaagtcatcacttcaactaccattgctctactgatgacaaccacagcatttccagttagctctctctctgtgcttcgtggctgtatgtcaagatgtgacttcactgctatagtaccatcacatgcctgcctgcctcctcccacgctcctggccttgatggtcatggactcatccacagaaactgccctcaataaactcttacttgtataagttgccttggtcatggtgtcttatcccagcaaaggaaaagtaactacaacagaagccaagagaagagaacatttccacaagaaaaaaaatgtagagaataatgcccaaaattgttgaattaacttatgagtattttagttgttgtagatttgtcctgccacgcttagatttttgctctactctaggatgatctctctttaagtagcaagaggtccccagctctctggtttccaatttggataaagatgatgagagagaaagtaagacgtcagaaaataggtggagagaggtcagggtgtgcttcccttttcctccctgtggggtcagtgcttagcagtgcccctctctgtcccagagttccagtatcagctcttccttcccctttactccagagataattagggccctttatcttgttcctagtctgtgagtgatttatcatcgctttaattccttaaccttgaccctatttctgtggttttttttcttaactaaactatctgtagtaaatttgaaccatttagaataaatgtccagcaaagctaaagctatagagaccgaaactaggtagcaatgacatggaacaggggctgagaatggagaccaaattcaaacaagcatgaggaaaccagccacagcgacggttcttcactttaaaattattgactcagtgtatttaaaacaggtaaattttatagatgtgaattatgccttcgtatatgtgctttcaaaaccgcaaggggttctcctcgagtgctggcactaaaatctcagagtcagctggataaacacaaagcatcccttctcgctgcggcctcttcagtgtcagtcctgagagctcctttataaaaagggcagaatgttcaaactatcagctccccgggtcgttctagctgcaggaaagagcttcatagagcgggagctacagctcatgatttgtatacttcggaggaattgagtttttcaggcattcaaggagtagttgagaaattactttagacatgcgggacttgaggtatcgcttacatatcatgacactgtggggtcaggaaggatatgtcaccaagacaagcaaataagaagaatttggatctccctcttcacggcccactgtaaagtctttccctcttgctacaagtcacggataatctatagagtggtgctttgaggccaagtagatgtgatttcatcaacaatatttcatgcacttttttttaaaatttactcactgtctgcagttgtttgagggatggtataattgtgtgggccagcctgttcagcaacttgggattcttcaacatcggcctcttgaattgagttctaggtgtatgctaccacagccaaatgcatgcaagggttttaccatttcctggggatctttcttggaatcagaaatattatactgagagctgcaaaaaaaaaaaaaaaaaaaaaagatgtattcctaatttggtcattttctctatattaactggctagcattcttctgaaaatagaagcagtgggggcactttctttatatagtgacccacataggcgacttagaagatctttaaaattagacacaaagtttcaggtgcatggagttggacataagcattcctgcattcacactgtctcagaagggaagcctggaatcctactaccctatctccctgccctagtcttctgcatttttaactagcataccatctctctgagagccaatatggtatctaaattcattcctaaagcatacccacagaatacttacatgctagggttatttcgtatccacatattaacaaaatgaatacagaacaagaaaacaggaacagcaacaaaaacccagttaattgagaaaagatagtaaaagcagcctgtgaagtttgatactttataaacggcagcaggcgatctgatattttcgtctagaatcaggtcattttctcatgtctacactcgcaagcctctaagagaggatttatatttatcatggaaaatattttttgtttgtaaactgtaccttactctgtgagacttgagggtaaaaagcagaaatgagcaagtcaggcaaaatcccagcatggatggggaatcaagcctccagcctagctgaggaggtattggcaatggatgggtgttagaagactcagctttcgcagggatgaggcccctgagagtctacccatgctccagtagacaaccctaatgcccacacgcatacagacagcactaaataaactcagtggctttacagaaaaacaaaacaaaacaagacattaatctgggaaggaaaagtgtgtgccggtgaactgggcaggaaatgagggggttgtgtttgatcaaaaactactccatagctgggtggtggtggtgcacaactttaatcccagcacccaggaggcagagacaggtggatctctgtgaatccgaggccagcctggtatacacagctagttccagaacagctaaggctacacaaagaaatcttgactcaaaacaaaacaaaacaaaacaaaacaaaaacaaaaacaaaaaaccaaaaaaaaaacaacaacaaaaatacccaatgggatagacagacaggcagataaaaaataccctacatgaatgtatgagatttccaaataacagaacaagctttatttcaaaatatagccataatttagtcaatttttaaagtcacactaggaagtcacagtaatggcaatggtggaagctggccgactctgcctgacaagttcctctggttctcttttaaaggtgatgctcagagtatttagtgtggatttcgtaagagaatccaagaagagcaatctcaatagctttgccagggtttggacaaaagatcttgaaaaacctaagtcactgtgccctggctcatcttccagccctggagacaagtcacagccagaagccagatggccttcccatctccccagctaatatctatattgtaatctaaatgtaatccagaaaaattacagctcataccagggaataaattagcatggaatgtgagctgccctcactcttttgtatatttactcttgttgggggtgcctcttccagtgtgctaagatggactattaataatcatggcaagtatctgaggctggaggtacaaccaagatttccaccatgctagacccagagaaggttagttactatatctctataaaggaggaaaatagggcaacatgaaagcagagaaaaatgagtgttccgagagagacccctggattttgtgtgtactttttgatgactactgactggactgatgaattgactctggcacagtgtaatctgacgatggaactcatctgaatgccattacagattagggaaaacaatcatgagtttgtgcaattaatccaagtctctggctgaaagacaagtaccaaagaccagaatctcaccaatgtacactgaactaatacctaacatctgaactttgtctgaaaataggtccaaagtcctttcaaggttaaatagatctttgcatagagtttgctttccaacagccaaaaattgtgctgcaaagttgcggagaaagagaggaccatgcccaccagatccaatagtgcctcctgctggaaatgatcagaacttcccattaggtcaaacgacctcagcttctacaaacaggcttcatgctgcttaaaaggttccccttcatatttagcgtcaccacaccagacgtttgcataattcatactgaactgcatttgtgcattacttatgttttcttcaaaccgccctgaattacttaatgtccagctcattgccaactttcccaatccttcctggggtttgtacaagctgttctctttgccaagcaaacacctgcccttggttaaactcttctttcagagttaagatgaaagttgacttctaagaagtcttgcttaatgataaaaattagacttatcagctactgttctaagttctttcaaatcattaaggttaactgctggaaatggggacgattatatgttacatgagagtagaaattgaggcagaaaggaaatttgtaaaagtgttagaaaaatgagccaggaagtttgtggtaaagaaaggaaacgttaatgcctgactggagaacaaggtagttaagaaagatgatggagagggtgcagagatggctcagtgcttaagagcatataactgctcttccagaggccccaggttcgattcctctacccaaatggcagctcacaaaggtctgtacctgcagttatgtgggatctgatgccctcttctggcctccgcaagcacatggtgcagacaattaggaaatacagtagaaggctgctctttggggcatgatctgctcaagtctctgtaaatgcttgctttagttcttttgtactaacataaggggcactcttggactgtgaatcctaggatcatatagctcaagtgaatggtcactggagcccaagcagtcttgaggtgcagccacgtccggctcgatcagtttccaagtatgacaatttgcctccaaaatagtcgcgtaaaggatagtgtgcatcgagacacgggagagctcaaggcctgccttccatcatcccaagatcgaatgctgtgaacatctccatactggttcctccggttgttgccttagggagaggaacgtaagccttcccccattgcttcagtggaaaaaatctctcctcacagactcggcgcccagagggctgaccacagcccgccaggttcatacccggaagcttcgcacccccaaattgagcgcgcgcagaggcggcaagggtggcgggaagcgcctccgccccgtcccgtccactagtccgtgtcgggggcgtggcgataacaagccccgcccacaccaagctggccctctcggcaaccggcacaacacaacaaaatggctgctgtgctgtcggtctcctgaggggaagtatcccggcgtctccgcctcgcccctcccgctaggccgttccttcccgtgctgaggcggtgagtgtacttcggcgtccggaccgagcctgggtggcgggcggcaaaggccggaaagccctggtccagcgtgaggtgtgccggctccggacgcattcggggcgggggagtgtgcttggaaaggggattggacgggaaggaggagggccggggccggcgtgggcaggggagggagggcaggggaggagaggcgtgcacagcctaggtcggggcgctgctgagtcgcaaagttggggtgcggcgcttagaaggatgaggttcccgcagagagggaagagtgccggggtgtgtcaccgtctgcgggataactgcgatggagatgggctggcggtcctgagggctctgctgtttaacctcagttctgtgactctgagcttgttccttttttcctttttgaagcatgtgtggatgatgggggtggggggacggacacgggacacatatcgtgatgcgcatatggagggcaaaggacaactttgtggagtcgggttttctccacttttccgtgggctacagatacagaacttagaacgtcaaattagcacagaaaatgcccttacccaccgagccatctcactggggctctgggcatgtcccttaaccacttcctagatgtcttagttaaggtttccattgctgtggtaagacattgtgacagaaagcaactccgggaggaaagggtttatttggctcccatgtctctggttgcagtgcattctatatcactagacaattcaattattttgtatcctacatcatagtcttctcttaaaaaatctgaaattataaaccatctagaattattcttatcaaatcctcattaaattattatgaggtcctatgttacttcccctgattagtaaattattacttctaagtaatgattcctatagaattagggaagtattcagtgggttccagaaacctggatcactgaaagattaagtgatggttccacacccctgcttccctccctgagttgccatagctcctgtgaagtctgcatgtagaaacacacactatctcataggctgaccctctcagtgaatcagggttctgagaatggacagcacttatggacagaaatagaatctgcaaggacagcttcgttggttgcagatgagcatttgtcttatttgaagatggtctgataccacactcagctagttttttcaaaagtatattgttaaactgggctttcagtttcgttttgtacatgaaggtagtatttggctatagggaaactcaaggccaaaggaaagcagcctcaggccaaattcaacttatataaagatttgtatgcaacattctattacaatatccttttctgataccaacttgtcattggattgaaaactacttaatatactatctcactaaatattttttttcctaaaaattagctgtacgtttgagaactgagggtctacattaggttgcccaaggtgatgtttaaagggaacaaaaaggaattgtggaggagcgctgacatttagaggaagtagaggaacatgagccagcaaaggaggccatggagtagaacagggttatgtcagtagagcatggtgtcccagaccagcttctgggaggatagagtgcttacaagtgttggttgtcaaatattcctgtatgtgaccttgtatggaaaggacctgtgaaaagtttgagctgataaactgagaaaagaagtaactagggacactctgagctgagcatgtgtcaatgacaggccttccaggtctccttctgtggaggctgatcagaggttaaggaagcactggtccataagcttggagaagtgtgggcagagtctattccatagccttcccgttgacagcatatgatctgatagctctagagagaatgtaacactctcagtagctgtggagacttagccttgttaaagacctcggaaactcttacaggttttgatggccacctggttttattcttgcaatgaagaaaggttctgaacgaaggctctccaaagcaaagatgccgctgtcatctcattttcctgggccatcatctcttaggtccagcatgcgatctaggtccctttcacctttaattggatctgagactcagcctttacatcctggcggacagtggcctgcacaggctgagctgacagatgaaagcactgtgcctttggagccccagcaacgtaaaggtactgctaaaactgtgtcttgtctcacatgtaagtcgagaagggaaatactgagcttaaatgtggaatctagatatacccctcccccaccccaccccctgtccccaaaccaccttgtattgctgctttaattgttagaaattgtggaagaatggagaagggactacttctggatgaaggtaaaggtgtctgaagggattagcggtggaaagtttctaggagaggaaggtggatttcttgtagagagttcatttaagctcttactagaagttttccacctcctcctcacccgagagtagagtgctttcaaggtaaaagtttgatctaagtgtgctagctgtgcttgggctcttcaggctgctgatctgtaagggcattgccctccacttatagaacatgcacaggtcccactggcatttttaaagtttttattttattgctgcccttctagtttgccttcagaaatgctttattctttgctaggtcgtgagatcgcatcagcctctgctgacctgagtacctgtcggttttctgttaacacacttagtttagactctactgtacagcttcactgtctcttggtccctggttggttctgaattgatcgttattctagaatgttggttttgtcgagagactattttgtcttttttaaatgcaatatgatggcattttctacaaaggccaaaaacgaatgtctgttgtctaccaagttgataccctaagtccataaaatgttatgatactttctatttcataaagcaacaagtaataaactagagctttgaaacaaacctcagtgatgcatgtggttgaaagtttgatcgacaggacccatggtggaaggcaagagctgactctcagaactgatgttctgacctccatattgtgttccacgtgcacctgcacctgcacacatgttacccccacccccaaataaaacaaaataccagttttaaatgtatctgcttgagttgaaattttagaatttgtaccatattagttgcaggatattgagcaaatgatttaaaatatttatttatttttatgtatgagtgctttgcctggatatctgtgtacacttgtgtgcctggtgttcttggagatcagaagagagtcttcttaccactggagtgacagatgtttgtgaactgccgtgtgggtactggaatcaaacctatgtcctcttcaagagcagccagtgctcttaaccatcgagccacctctcatgatcaaataatttttcataaatatgaacattaatagtttttcttcaaaggtttatacaaattacatatttaaatgtaaaacatttactacaaagcccaaagtgatagactgtgttcattatggtaatgaaatgatataaagtgacatattaaggtactgttacagccagccagataacatctgtttatctgcatggattaaagtttcttatgtatagtgtaaaaatgacttatatttggtgattgatattcatatcttcctagtgataatgaactattttctggatttcaggagctgagtcatatgtaggagtccggtatattacagaagccctcatcaaaaaactcactaaacaggacaatttggccttggtgaagtctctgaatctttcactttctaaagatggcggcaagaaatttagggtaggtttcaagcagtttctaaacataagcattgatttcactttcttatgtcttaagcctgccagaatttttttttaggaattttttttttcctttaacatacacatgagtgcagatatttttggaggccagaggcgttggatcccttggagctagggctattaatgtttgaaaactacccaacttgagtgctaggaattgaacccaggtcctcagcaacagtcgtggaggctcttaactgctgagccatctctccagcacccagttagcaaatattacttttggaaacatcaagtttttatttcatggtatcattatggcagagagaatggcaacaggcaggcagcaggcaggcaggcaggcaggcaggcaggcagggaggcaggcaggcaggcagcaggcaggcagggaggcaggcagggagggaggcaggcaggcaggcaggcaggcaggcaggcaggcagggaggcaggcaggcaggcaggcagcaggcagcaggcagcaggcaggcaggcaggcaggcagcaggcaggcaggcaggcaggcaggcaggcaggcaggcaggcaggcagcaggcaggcaggcaggcaggcaggcaggcaggcaggcagcaggcaggcagcaggcaggcaggcaggcaggcaggcaggcaggcaggcaggcaggcaggcaggcaggcagcaggcaggcaggcaggcaggcaggcaggcaggcagcaggcaggcaggtgtgtgagagatagctgagagcttttcatcctgatccacaggcagcaggcagagggagaacaagacacatgggcttttgaagcctcaaagcataccctgatagtgacatacctccttcaaaaggacgcacctcctgattcttagctcatcagtttatgagttaatgggggccaatctcatttaaagcagactttttttttttcatattagtttcagtgaaaacaaaattctcaggtattttatttaatataatctcaaacctcttttctttccttttcttttctctctttctttcttttttaaaagaaattctctgctgtatatacagacagaaaggaataggagagtctaagtatagacacattagcctcttaatggtggtttactgggcagtgtgattcttccaggtttagtgagacctcagtaagaatgttttgtgttttgtttgtaagtgttattagaatatatttaggtctaggttgtacagctatagaggaaaaggaaactgcagaagttttaaagttgtaggaatgacatatcacgtcaggatgtagttgctctgtggctattacgcacaccagacatgtcagtcaaagaggcagatatagggggaaaatttagagtttggcgtgaaaagtgtctaggattaagtgtagaaatagggagaatcagagagaatgggatggggaggccaaaccgatgtgaaagtcagaaggatcttttgtgctggaaaatctccaggagcacgaggctgcaggtagaaacctcagacagccaggacaacagtggcacataggagctaaagatgacaacaggaggcacaggacttggccatttagaagtctttccttctgtttctcaaacccatcaactctattttcacaaggattatgtacagtagggatttttttttttagttttttttttaatcttattttatgtatgcatgttttgcggtcatgcatatctgtgtaccttatgcattgcctggtgcctgcagaggctagaagagggcactggatctcctggaactagagttacaggtggttgtaagcaaccatgtaggtactgggcatcaaactgtagtccttttccagggcagcaagtgtcgaaccatctctccacatccttgtttgtgatttttgttactttttaaaaaatattagcctggtgttctctgttcctgggtgtacgcacaattgattcaactgacatgttattaagttctctgctggatatacgccatctgtgagactttttcttaccaaccagttgagggtgttatagacagacaccctctcctcttcgttcaacagatatttatttggcatctagtctgtgtcagcagtagagcttagcagtgtacacagcaggcaaaaatctgccttgtggtgccttgcatgctggcacaagatgctcccatattgtctttgagttttcactgtctaaaatcttgttgatgtttgtatatcccaagaaagtcaagacatcctatgtcttatttgccactacattttgtgtgcatatgcatttcatatacatagaacagctcctggcacctagtccatgttggataaatatttgctgaatggacgatgatggagaggcaatgatgtgctaaagacatcaggacagtagcagtaaatgagaaaggcaagaaaagcagaggtggacaattcttgtaagtgtactcatgacaaatgagggaggtaagaggaaggtgcagtagaaacgccgtatagtacagcgcaacttactgagtacagaagaaatgtgaacatggtgaatatgaactatgtagcagggaaatgacctgggtcactgccataggcttcctgcgtggtaccacacctatatatattagccatgcagtgcacatctactataaagtgactgcctttaaactgagaggaggggacaggaggcccttagatagtggagtagtcagtttataaagagtaaggcttggtcttcatgtggctcccccatcaattggagtaggggctgtccctaactctgctgcctgcctatcgatcctgttcccctaactgggccacctcctctggcctcagtgggagaagatgtgacttgatgtgctaggttgggttgatacccaggagtcctccctcttagagaagtggagggaggttgagggagaggttatgtgaggggggatgagaggaggggggctgcaatggggatataaataaattaattaatggagggaagaaaggataggacagtggaagggaagagggaggggcagagaaagattgaggtcagggggatggtggtgaatagcttgaggctcttactctataggagttgctggggtcagggagaataccagcagagccttgctacttgtggtcaaagaaagctgtagcagggattgtccaggaaagctgttagggtttgctgatcaaaacagcctctaaaagtgtcaagaagcctgttatataaagtatttaccctttatttccaattagtacatcgaaaatttggaaaagtgtgttaaacttgaagtactaaatctcagctataatctaatagtgaagatagagaaagtggacaagctgttacgattacgtgaactcaacttatcatataacaaaatcaggtgagtgactgctcctttgggtgcattgctaggtcttctttgccagagatggactaatagtatctgtgctactgaaagagtgctttgaagtaacaggagttttgagtcttgtttattgaattctggatcgtcacatctgcctttatgtttcagtatcacataagtatagagtagtttttacttagcattgcgaaagcagataccttttcatggtaccaacgtaattctattttaagcagtaactttgtctagttgttatctgtgattccttgccttagtacgtgagtaatacatatgtgaagaaaatgctgttttgatcctgaagatattccaaataatttgatcctgtatatttatccttttattctttgctattgctactagaaatgaggagtgtatgtctcatttctaattcagatacacatacaaatatacaactacagggataaaccagtgtagtaaaatctaatgatgacttaagctacttagaaaactataatggggaaatgaagcaaggatcaaatcttgaaaacctctatgcaccgtctccccaactcagacttctgacaaatgaagagtgggcctggagaagttccaagacagaaatgaaatgttaaaaaacaaccctggcaaatcaaggtcataatatgaaaacattcaaaagagttgatctaatgaaagtaatttcttagtaaaaacgaagctagagaagccgaggaatatctgttgagaatggcacatggactagggttagattgacagctggattgtagagactgtgaagagcatgccatccgccatggtttagagcatgagtggcaagtgcttcattaatttgaaatattttcactgcagcgcatatatccataaacagtatcattttagaatgtgtcacacatgctgctggcacagtacatctttggtgatgacaatgcaattattgtggacatctgggtagcacggtggcacacagtggggtcgagcgttggccatgggcatcctcttttctcctgtgttatgtatagtatagtatcctgcatatagtaaggtgggcagggttgctaggcatactcatagagcagtggtgggttggggaaatttgactttggccatgtgcttgtcgttcaggaaaagagttcgtgaattatagttgtgagaagtagcctggtctgctgcggctcttcactgtaaactacagcgaaagggcttgatcatttactcatcatgtttgattttcttctctggtttctagcaaaattgaaggactagaaaacatgtgtaacctgcagaagctaaacctagcaggtaatgaaatcgagcatattccagtgtggttcgcaaagaaattgaaatctttacgagtcctcaatctgaaaggcaataagatatcatcggtaagttattcaaaatagcaagattatttttcctaaaatttaaatgatttggacggtaaaggttttgtccatgtatgtattttacattgagcgctatccctctcctgcccagcaccctctcttttactgccccttgctcctagtccctttatcctcctaaaatcttctttattcagatttcttatttgttgggaaaatatttaaagagtgagatttcttttggcgtccttgtttcattggccatatgccatattcagatataacctaagattcttcagtgtattaaatacagactgccctcatgttcttaagttcagtggtaacacattgcactgccttacatccctctgcctagtgccattcttcataggtaataaggatgcaatggatatctatttaaagttattctgagataggaaatttgattcctatttttcagataaagtcttaatttctttcatgctttgttagaaaatgcctcctgaatacctaatacattggctgttacaactggaacaatcatgatataacttaatgacaattgtcatagattagaaagggaaagtccacaggcctacactgccctaatatgaccctggagagtcttttgatttctataaattgtctaaaatagagaaaatgctttctaagaggctcaggtgaaccgagaggaataaaactgcttcagaaactttagaacaatgagtaactaaggcttgttctttattccttcaagtgtgaagacagattagaatacacaccgtttttttcatcttactgttgattatttcgcttctctgttccttacatggaggttgtggtgaggcttctctctgtaagccaagcacacctcagacttgtagttctcttgcctttgtcttcacaagttggtgcacaggcatgctctgccacactcagcaggaatccttccttcttatcccattgttaaaaagacctgggaaagacactctcccttctactgccagagctcccgagcctcagagtggaagccttagaccattcagtatgtcactgacagctctcgaaactcacgggattacaggaagacgcagccctggatttacagtcgaccccaagtatttctcagggttcttgattttaggtcatacccagtgtctgctgaaaaacaggaagactgttcagtattgatgatttgtaatcatatatcatcttctcatctatatgtttggcattgacatcattaagggtaatagatatttatttgggggaaaatatgtacttgtactagcaatttaatttaattctcccaacctacataagttctttgaataaacaaaagagttttcaaagaatgtgaatatctacatatgtttgaatatctatatatgtttttatattttttaactatcagttataactcagttatcttcatatttaccaaaatccttcatagcagttcattttatgcatacttgatcaatacaaaataaagacattgcaatatagactgagattgaacctctattttattcacttacagagtctgagctaaggcaagtcccactttgaaccttgacaatgcatagtactgtctgacacaccagtgctcacatggcccttggtgcccctttctcacactgctaattaggggccatgagtttcataaatagatttcttgacatgctaaaggcaatgctgttgatttattacttcctttgttcgtttaatcattcctatactgctgtggtaccatttcagctccaggatgtaagcaagttgaagccacttcaagatttgacttctttagtcctcattgacaatccagttgtggcccttccgcattacctccagttcatcattttccacctccgttccctggaaagtttggaaggtcagccagtaaccactcaggatagacaagaggctttcgagagattcagcttgggtaaggtgatgcttacaaagcaagcaaacagacagagaacactaaactggaatgagaagggaactgacctttgaaagttctgtagaaggatagggtctgctgaaatggttcagagggttaaggcttttattgccagacctgaggacctgagttcagttcccaggaccacttggtggaaggaaagtacaaacgcctacaaattgtcctattacctgtattacctaccccatgtcaggtgtgcagccctactctcagccaatgaataaaggaacaaatataccacacctaacatttaaaacaggaagggtaaattataaacctgataatcctactaaaatggaaatggcaccataaactggttaatcaagcaagtatctgttgccatatactatgtaccgaaagttccccacctcaaaagtgatgtgtgtgtttgtgtgtgtgtaaggtgtgagaagaggaagaacagtgagcagccaagaaaacagtaaatgacaagctagtgagatcagagtacagaagacagagtttcagatgcccagaaaagatttcaagagagccagtggtccccatggtgaatgggctgacatatgagtaagtaagattaacacagacatggatttagaattactttaggcctggcagtggtgtacacacttttaatctcagcacttgggaggctggtgacaggtggattgctaagttcaaagccagctcggtccaggatagccagggctataacagagaaaccctgcctcaaaaaaaaaaaaaaaaaaaaaaaaaaaaaaaaaaagaaagaaagaaagaaagaaagaaagaaagaaagaacaaatgctttggattagtgttcctgctcagagaagctggagagggatgggaactgatggtagataaggaatgggaaggagatattggatcaaaggtttgaaatttctacagcagtctcactcttccaatacttaataactgtaattcttaagtattaaaggtaaagaaaagatctaagacttaaacactcactgatagcttcaaggaaatgggaagagacgacatgcaattaatcctcaaaatttttagtaatgaaatagcattcctgagatcagaagggagaggcaagtcaggcctttattcctttacttcataaaaacgaggtccaaagagattagattttgagaggggcaggggagagctctcattgatcatcttttggtaggagggatactttctttttttttttttaaagatttatttatttatatgtaagtacactgtagttgtcttcagacactccagaagagggtgtcagatctcattacagatggttgtgagccaccatgtggttgctgggatttgaactccagaccttcggaaaagcagtctgaaagagcagtcgggtgctcttacccactgagccatctcaccagccccagggatactttcttgatcaaaaaatagagagaaaataatatgtatgtgtcagtacctttgttgtctttgcggtaggagaattagggccctcccttaatgaaacatgaagctctctgctgagaaagactagttggaggatgggaggtttgaggagaaaggatatgaagtgactattttagagtgttgaggaatcagcctctctttgatctgaatttgaaatcggtgttaatctacttttgatctacaaaaatggcagtttcacaccagtgagatggctcaatgaggaaggatgctctctgtgcaagcctgatcagacacagctcatcctggaacccacagaagggtagaagagagcctctgtgnnnnnnnnnnnnnnnnnnnnnnnnnnnnnnnnnnnnnnnnnnnnnnnnnnnnnnnnnnnnnnnnnnnnnnnnnnnnnnnnnnnnnnnnnnnnnnnnnnnnnnnnnnnnnnnnnnnnnnnnnnnnnnnnnnnnnnnnnnnnnnnnnnnnnnnnnnnnnnnnnnnnnnnnnnnnnnnnnnnnnnnnnnnnnnnnnnnnnnnnnnnnnnnnnnnnnnnnnnnnnnnnnnnnnnnnnnnnnnnnnnnnnnnnnnnnnnnnnnnnnnnnnnnnnnnnnnnnnnnnnnnnnnnnnnnnnnnnnnnnnnnnnnnnnnnnnnnnnnnnnnnnnnnnnnnnnnnnnnnnnnnnnnnnnnnnnnnnnnnnncacacacaaataataattatagtaaaaaatcccttcaagttaccatacctttcttaactctttaatataggtcagattcagattcaaggtggtcaactttttccctaaacagcatggcagctgattttgaagtcagttgtgctacacagttcttagacttgttttgcactgttctgagcatacttgatgttttccaagatgagaatataatgatgttagctacttcgttttttattgacagaggagatagaaagactggaaaaagacctggagaagaagacagtggaaacagaagagcttaagaacaagcaaacaaagtttctcgaggaaataaagaatcaggataaactaaacaagtcattaaaagaagaagccatgttacaaaaacagagctgtgaggagctagaaagtgacctcagcacaaagaaggagttggtgagtctgttatacattggtttggctgtattctgttactgctcttacatgtaaaagcactatgtcctgctgtagcattggaagatgggggttaacaggaacatggacaagggctttgtgaactgtaggtgactgtgatgtgctgctcgaaggagaatgtgtgaagaacggcacgatggggagcataatgctgtgtgctgggaggagctggtcaaactgcttaggatatgtttcaaatagcatcacagataagactgataacatatcctgtgtcatggagacttcttttcaatagaaatggtaacagtaatatgttaaagtaaagtccagtgcgtgcacatgtatacacacacacacacacacacacacatataataaatcttgataaagctttaaaaagcttattaccaatttatgctttccacagcagtgagtaaaaggaacaaactgggtttattattgtgaatttatgggggggggggatggaatcttgttacagttttatttttttgtttttgtaatggctggagaagtgaatagtatatatgtattcattgatcatttatttttctttctttttttaagataataatcattttatttttttccttttcatttatttatttatttaggtattttcctcatttacatttatttttcttttttaaattacccatttcattattttttctcttttttgttattccaaagtactggaagcatgtatgattaaaaaaagaattctaggtcttattttgagagcttatatttttctttgtctcttgcagaatatgtgataacatctttagtgatttgcagttttattaagtaattaattgtgcattaaactagttttttttttaataaaagtcatgttgaattaagtcttttaagagccatttaaactgtagttaacacccctatcctcaccatcggcaaatactaaccaacttgttctttatttgttgggggtttttgtatgttggtttctttttttgttttattgttttgcaagctacttaactttgaccttttacagttcttgctttttaaatgggaatatttacctgccctgccaccctcacaactgtgaggacttgaggctctgagtgtgaaaataactccgagtaaagcaagctaagtaatgccaggtggtgtttatgctcggtgaaaccatgtgtagaggcagattgagagagtactaataaccatttccttccatggtatgtcatcaatagagagatgctagtggcatcagagcctagctctccccactgttcttcaggtgacatgtctgtttgattctttcttctctgagcccatgtcttggtttcttacaggtcattttccactgagtctttattcttctctaaggtagctcctccagggctgagctgcacactgtgttctgtggtgtcgcatgatgacttgtcttaatatgcttgcttacattttaagttttcaaactggcttgcttctttgagaatgtgtttgtgtttgtgtgatgtgttataaatgactttgtctacaggagagtaaatttgaatatgtgaggaacttagtattactcgtcctgttagtaatgtgttaactgcagtcatctcttgattattcacagccagtacgcagctagcctacttcctttgactcctgtttgcagtcctttatgcacttgtgccttcggatatttgctgagggcttattatcatctaagtccagatctatgaaaaacacaaaatcactttgaaaaaaagccatgcccgcctttgtttggccctattgtcagtttgctttggggggaaaaaccctaaacataagtgatgctgttgattgtgagttgtctctgagactcaggtcctcttgaacattgactgaatacatcagtgtgggcaatgcactagacagcaagaggacattgatggcaacatgggacagcagagtgctagacttgaacccatgatactagaatttgaacactgctcagttgggcaagtcgcttaacatctctgagcagctttgatcgcctcctagtagagtagtgaagcctgggtgagctggcacatgcagatcacacagcagttgtgcgagagcgccacttagtgttactccattggatggatactcaggaggggactgcacgctaacttatgcacgattttgggctcctggccttgtaaaatgttcgtgtgtatgctttgtttcttttcaacttgcattttgatgaaatatttctgcatgcttttctgtctgaaagcaaccctcagattgtcaaaaaagaaaagaaaaagtgaaaaatcccttagcggacctttgaatgaactcaaacgatctgtttggaagtcaggtcacctgtggcaaggcagttcaccaatctgagacacaacttctgcacttgcaaatgcagaaattagattatattatccttacgttctcctcctagtgccaaaatctccaagagtaccaaaaagctgcagttagagtaaagttactggattattaaaagttactaatattacatatttgcatctgattgagctcatttacattttttaacctctgctacaaagagttctgctattctgacccagcactgaggcacttgtctatacgtctggtactcaagaggcttagacagggagttcacacaatctgcctgcctgggctgcataacaaattcctggcaaacatagtgagatcccctgctcccactcccacccatactgaacactcacagctaagattcatcagctaaacccatctcctcctcctctgtaaaatgtccttccatgaactgaagcaaagagtgggtttactacatctgtattagtgatcagaaccaggaccaggatgcaaagcattgcaggatgcctggcatttgtttcatgttcacatgaaacaatctgaattgttctttatgactcactgtgtcctgaaatggcatatcagaggtattttatgtgacctcttctgaaatgataagtgtgttgcattttttgtaatgtgggattgagatgaaatattctcagtgttgtgctatttgatatagttttgctagaactgcccatatcatcatgggattacgttaacgtactgatacttatccgtctcatattggccaatagctaaaacagaaaacagtggaactaacacgggcatgtcagaagcagtatgagctggagcaggaactggccttttataaaattgatgccaagtttgagccattaaattattatccatcagaggtaagtttatattttttagtaatccaaaattaaagccaggattgggggaggcaggaagaagacaagtgatagtaatatcaaggggattttatcatgaatctctctgttacctttttaaatacatatttgtgctcatatgtgtagaggagggcatgcatgtggaggttaggcatttttcagaagttacttctttgcatccactgtatggttcccagagattgaacttgggttgtcagtcttgccatctccagtctactccagtttcttgatgtaaagatatcatcaaagctaactgtactgtggttgtacttgtgagttatgtggctgatggagtgaaaatcgtgttctaaagataaaagctccagggagattgctgcctacagccccgtctgcagtcaaaagctgtctgttaccttactctaggtgcagctcagtgagatgcaaactttcagtggaagtgcctcagcacctctgagtggtagctcctagcttgcttgcctctgctctctcgcatcagttatagttagccactgttagtaacaataccatatcaacaaggagctgcccagtggccaaggccagtgtgttcaacagcacgcgcatggtttagttcctagaaatttaatattaaaagttattagattgagatcttacatcaatcaggaaacaatgtaatacaccgagacttctgatttaaagatgaaacagtgctaagcaatcccgtagctgtgggtagtctagtcagttaatctaaactctactgttaagtagagggagtaatcctgtgggtagtctagtcagttaatctaaactctactgttaagtagagggagtaatcctgtgggtagtctagtcagttaatctaaactctactgttaagtagagggagtaatcctgtgggtagtctagtcagttaatctaaactctactgttaagtagagggagtaatcctgtgggtagtctagtcagttaatctaaactctactgttaagtagagggagtaatccttttgagaccatttttagttctagttccttttcgctatatgaaaaagaagagaatgaataacatatcttttagcctctaggcatgttagattaatataaatgtaagtattctgtgataagtttgccattaataaggtaaataatgtcatttgactggaagttgcttcttaatccataaatcttattaatatgcttgctttagtatgctgaaattgacaaatacccagatgaaagcccttacattggcaaatccagatacaagagaaatatgtttgccacggagacttacattgtcagcgacgcccaggcagttcagatcaggaagatggtgccagaaggaggacagcttagacacgagcacacacccccgagagtccaagcaccacctgatctacagttggaagatacggaaaaaaaaataagtgcaggtaaacagaggtactcttaagttcttagaaaagaaaagacaggctatgactgcatggtggaacatttgcctagcatgtgcaaggttctttttcagtgtccagcactacaaaaggtaatgcgtgcacacatacaatatagtcctagtatcttaaaacagtggtaagagagatcaggcacagtccttctgatgttatgaattatacaaaaaagattaattagggttttatagtacagagcttaatagagatagaagccatcataagtaagacatagctttgttctgcaatggaacaccttaactgggtggagttcattgcaaagaaagaaagtagtaaaaattctagaagtcgacatttttttcatttgtgtatgtgagaatcgtttttaaatttgcagcacaaactcgactgtcagaactacaccatgaaatagaaacagcagaacaaaaagtattacgggctactcaagaatttaaacaactggaagaagctatacaacaaaaaaaggtatgtgaatcatgccagagaaatcactgttaatgtgagcttgcttcctacctgtaaaactgcagtagtggtggtgcttgcctttaatcccagcactgagaaggaagaggcaggaggaactctgaatttgaggcctgcttggtctatagagtgagttccagaccagccagggatattcagccatataaatcattttgaaattaattattggattagtgtagactagaatatggttacagtattttattcataatgatatcctgttaatatttcataaaatatgtagaaataaattacttaaaaaattcaggtggggtggcacatgacaggcaggcaagtatctgagttcaaggccagtctggtctatagaacaagctccaggacagccagggctagacagagaaacattgtcttgagaaaccctgtctcaaaaaaaccaaaccaaccaaccaaacaatatattacttataagagtaattactgctcttccagaggaccagagtttggttttggatttttgttttgtttgttttgtttgttttgttttgtttgtttttttttaagttactgtgtcaaccctcagaactcactggtagactatctccatatttaaactgtagtacaccaattcataaaatgtctcaagtcacacagtcttggtcctatgacctcctaatatgacattgaggaagacacctggatttcccgtgatgttattgtcctacacgtggaactgcagcactgatagagcacactgttgatcccagcgcacgggagtaagaggcaggctgatttctgtgagttctgaggtcagcctggtccaaatagtgagttctaggccatccaaggatacatagcaagaccctatctcaaaaataaatataataaattgccgtggtatctttctaccttacatgtttcaaggattacaaggtatgcaatttagagtcgtacctgctgcatgtccatgcatcaagtcagccattctactgctgtgatgatgacagctttaagtgcacttgtcaccacattcccagtgttcataagcttttagaggtggggtttctacctataattagcataaaactacaaactgcatagagactgcctagctgtcttagctgcttttcagttgctatgacaaatcaccgtgaccaaggcactttataaaagaacctgtctaatttggggactcgcagttctagagagttagaatctatgaccttgtggcagggtgcatggcagcaggcaggcaggcatggcactggagtagtagctgagagatcacaacacaaggcagaaagacctgactgggaatgacttgggcttttgaaacttccgagcctgtaacacctccaacaatgccaaacctcttaaatcttctaaaacaactggagaccaagtattcaaatacataagcatgtgggaacaattcccattcaaagcacaacactagacaattaccacagctcttactttaaaagtcttctataacagagtatttttgaagttataggtgctagcttcataaattgttgttgctctcctttattaattatgtgctgggggctggggagaattagatttcagaagcagagaaagacctccttctcaagcagttgagtggtagactacaacatctaaacagattacgccaggaagctctggacctagaaatacagatggaaaagcaaagaaaagaaattgccgaaaagcatgaagagatcaataccgtgcagctagccacagacagcctggatcccaaagacccaaaacatgtaagtaaaatgggaaatcttgactagttccacggtctccgtggaactgctactttatatctgtgtatagatagtatttgccttaccattttaatagcagaatcctttctgaaagttttcatttgctatacagatttaagttagaaaaaaaaatattattcatatacaaataattatattttattatttatatttattaattatatatgtaaattatttgtatatgaataaatataattagatagaaagatatgaatgtattcatatcaaacatttatatccaaaatggaaccacctagtcttgaacaaattggttttcaataaatgaaggctacatgacacactggggttagtggctgatttttgtagtattctagagcaagagaaactttcttcaaggtgctctgtaaattggtctcctaaagacaggaagtgctgaagcaaggtcagaggacttctgtacctctttaagttttcatgcagataatccacaaacgttgtttgctggttctatttattttgtccttaaaaagaaaacatttctctagagtttgccatgatgtgttgtgaaataaagatgagtgaacgatagggttagactcttgtctctttctgtcaatctataccctagttaatcttactaatgatgtatattttagccactatttcctttataatttactgtcacaggtggaattgtaaagttataataaaaaaaatgaagatctctggagtaacaggaatcagaatgtaatgtgataaggacagtgcactagaaatgctctaagtacttgtcagatttctcttttaacatcagttttatatgtttgtatgtatgtacctataaatagaggccatgtaattttgacaaggataaactaattgttgtaggtataaaatatcttcaaaaaagaagcctaagccttggtattcttactgaaagcattattttatttgtgtgcgtccatgcgtgtgtagtgtacatttgtgtgtgcacatagcatcatgtgtatgtggagggtagaggtcaatgtccattggcatcctcacttgttttctgtttatatatatattcattcattcattcattcattcattcactcatttttgagacaggatctcttattgagtctgaagccaattaattgagctaggtcaggagcttcagcagttggcttttgtcccctccacctaacccacactggggttctatggtcttgctctgtgcctgccttacaggagggctgggcatccagatcagctcttaggcttatatgcccacctccccaggttattctcaagaatttttgtcagatgaaaaatcagagatttttaagtcctgtaatgtataacagtcagtagtatcttactatattatatttacatattaagtcttccgtctgtgaaagggttgccatgacaatagaaaactatatcccccagaaggcaagaatgaagcagcttgctggtcctgagtcagattaaagccacaattgtgtttgctacagcaaatgaccatggcattctaggcataaggggaaattaagtttccctgtatttctgagcagtatcacatagaggaaagggctaaagagaccttttgttttgtttttgttttgttgttgttgttttggtttggtctttctttgagacaaggtttctttgtgtagccttggctgtcctggaactcagatccatctgcctcttcagtactgggattaaagatgtaccatcacctccctgttttttgtgtgttcttttttgttgttgttgttgttttgttgttgttgttttgagggatgtgcctcaagacagggtttctctgtgtagtcttgagggttgctaggtaggagtaaggcacactgaccaaactccagtcctgataccacagcacagttctcaaggttttcacttgcagagggtagaattgtgacttaggaaaactcaattacttgcccctcagcactcttaggaagggatggagcccttgcttaagttattacaacaaccctctccttacaaaaggatttttaaaatccaaaaatgaaaaatgaaatcttagctcagaaccaagcctattcagatttttaaaaaatacataaacattttattaggtttcaaaaggggaaatggcgtttaaaagtcgaatcccgttttatttaccaagttttcccagctagaggaacaattgtcaactgcaaacacaatgaagatctgtcctgctttcctagagggaattggagtgatctttcagcctttgggtgtgattggccctcgggagcttcctgtgttttgatttaaagttgcaggcggggcctgaccacagagactgctggtgactggactagctcgctgtcactcatgcttgactaggcccatagtttgaggcgctgggaagttacttgggcacggaggcgcttgccaagatgtggctgtcagagagggaagtgcacatgaatttgaagacagacttagaaagctttgcgcagcctgtttttgttccccacggctctgtcataacaggaaagattcggagttaaggtatggtcgttcctctgtgtataaagaaagggcttggacggaggaggagccagatctgtaagttcctgtttgttcacagtaactcttttgtgagctccaccgctgcagaagaaccgcaggaacggccgtggcgccgcgtgtttcacacacagcagtgccgtcttctgaaccacatgtttgccctgcgtatagaggttgcagtgcacttttaacagcgaattttaagctgttgattaagaggacagtagaatttttgttcattcttgagccacaaaagtgtttggtgtactattaggatataaactcttacctacctacagtaactgttgtaggaaagatttaagatgggtatgtggggagtgggaaaaggtgattcgaacaccccgtcaaatctaccacctgtaaaataacagctggcctcaaaggtggcggtggccactcatttgctccccatttgagggggggggggtacctctcaaactaagctctttcttgtagaagctaacatgtcttaggcttggaaacagtagcacttgttgctcgggctctaactgttctcctaatgagttttccctcagttattgttctgttcttctgatcctcttggataaggttggagtcttgggagccttgaggggaaggaaggcagatgtctctctcgggaattattttgtctccaaatgaactgttgcctaaggaaaccagtcaagacatttgattgacgtgagattcaggcttacatttctgaagtggaaggttagactagatcatttgctctctgttttcctcagcacacctgggggagataatacattcctgtcacttagcagtggctccatgatatcataattgtcagggcacaggaacaagagggtgtgtgggccagagcgcggagagtgtaaggggtatgcctcccagggccctacaaatgaattcctgctgggataaatgatttttgagcttcctctccattcccagataattatatctaagaacaaaatgtttgaatgaatggaaatagaaaataaatttgaatcccatgtgtttattgatctgaagtctccattttctccaagcctacctgagaaaccttttaaaagtataattaaatgctatttctttcaaattaaaaagactttagttatttactataaaactcccaacctaaaatttttgtaaattttaaaaactataagtaaaatctcttagagtccttatacataaatataatgcctatttatactttgaaattatctttggatgttccctgtaaatatgctgtcagtgtaaccagtgttctgaaaaccttttttaaaaaagacatattttaatgctatgcataaaacactgaaatttctatattgtgcccttgaaaaatggcttatcctccctgatcggctctgtgttctcatctcatctcggatcaccctaaggttaaacaagaaccatctatatgaaagttctaaagggcctaactcagagcagatgaaattgtcacactttattttcaatactggtttttaaaatgttgctaagagttattattttcaatagtgttaaaattttgggttgtattgatgatttttttccctgaaattcagtcccacatgaaagcccagaagaggggcaaagaacagcagcttgacattatgaacagacagtacacacagctcgaaagccgcctggacgagatactttgtagaattgccaaagagactgaagagatcaaggaccttgaacagcagcttacagatggtgagaactcaagtgtgatttagggtaaatagcttcagggcacacagaagatgctcacacggacaatccaagacttggctggatacagttcagctctttttactagtgttcgatggggaattttggctgaacatacccaaaaacatttagtgaaatttaaagtattttgtattattatggtttgttacgttgatgaccagtgaatcaggcttcagtagggaagaaatcaagctgatcaggaaaagcttggtcagtgattgccttctgtggcatacagtcctttcaggagcccgttgacgttaggaaactcattgtgagttatagaaggtgtatagaaagaaggcaaatttaaatagcattttcagagtagaggaagagggaagtaaatcaggtgtgtgacggagcctgagctccaggtaaggaaaggttccatccgttgatcgtcaccttcagtttgtctctgccttgataaatagttgttgagagaggctttttaaagttttcataaaagtatcctgtaaaatagcatgtgtcagcatacactttttaagtacttaactaaaaatgtatgtatgtgtttgttatgcctgaagtatgtctatgtaccatgtgcatgccgtgcccatggaatctgtaagagaatgttggatcccctggaactgaagttacagaccgatgtgaaccttcatgacaagaagccagttactcttaactgatgggccatctttccagtccctatgatagctttttacccttcagggtatatatatttatgctgccagtctgagattcgtgtgagtcttatatattgactggttttgtattgtgtattcaggaagaactcatagttttattatactttaatattatttctttctttctttctttctttctttctttctttctttctttctttctctctgggttttttgtttgtttgtttgttttgttttgttttgttttttgacacagattctctatgtatccttggctgtcctggaacttgctctgtagcccaggctggcctcaaactcacagagatccactttcctctgccgcctcccacatgctgggatcaaaggtgggtagtactaccacccagcaatgccttttttcctattttagaaaaaattaaattttacagcattattcaggcattctgtaaatatttgtcataagtatgcttgtcttatttatgcatacttgtacaatattcctgtattataggaaatatattatcctattttcaaaaattagatatataagaaacttagactttcactgtgggctaataaccaatcactaaagagacaaaatacttctaaaatacatattacccctctgtttttatcatgcataggccagatagcagcaaacgaagctctgaagaaggatttagaaggtgtcatcagtgggttgcaagagtaccttggaaccatcaaaggccaggcaactcaggcccagaatgagtgcaggaagctacaggatgagaaagagacattgctgcagagactgacagaagtccagcaggagaaggaggaacttgaactcattgccatggatgcagaaaatatgaggaaggtaagacttgcttttctgctttttgagcttcggaagtaaatgacgtatgtcaaattcacttagaaacgggtcatcaaataactgaagaatatgaacgtgtgtctacccaaaatgctgtatcaaatgtttatgttgggttcatggagcaaaattataggaataccatggttcatcttactgttattacttgataactgacattatttacagctaatagaacatgagttacgttacacctttcatcttctgctcatcctcattgctttgaggatttccctatgttgttttaacgacctgttttagataaaatcttactatgtagctcaggctggccttgaactggtgactctcctgcttctgctgcctgagttcaccacaccagcaggaaatgttacagtttgtcagatttcatgtttgttaatctgctgaattttaaaaggtgtcttctctcccaactttatattatgaaaaactcacatttgcaggaatattgaaagagtggcgaagttcctcagcctccttagattaataaatactttagtctggcccttataaacatatcccttttgtttgtgctcagaaagtctcagacatcacccttccatccgtctgctcttagtttccagtgtcactgcaatgaatgcattattacacctaggaaaactcaggctccttcccaaggctcatctaaccattacaacaccttctgattgtttctctgtgctgttgtactttgtttctccatgctccctataaagcagtatctcttttaaactttattttctccagacattggagcggttccacacctttcatttgttctttatggttctgatttcctcagcctagtggattcctattcatagaattctttgaccattttttttttttactggaccatctttcttttgttaatgatttgcaagacctttatattttggatgttaatcttttattgaatacatacaatactttatttcatgaagcagtgccaagtggtccttgaaaaactaaatagaagttacccaggatctttgtgtttatccagagtagtttgagctaattctttcatacctaaataaataggtagaaattatatatgcacacctgaaggtttgtcagtatgagaatttagctatgaaagtgtttgtctttcttagtgctaactggatagttgtaagccctcagtccagtgtgctattttttgtttttgtttttgttttttttgttttttagacagggtttctctgtatagccctggctgtcctggaactcactttgtagaccaggctggcctccaactcagaaatccacctgcctctgcctcctgagtgctgggattaaaggtgtgcgccaccatgccctgctccagtgtaccatctttagaatgccagtgctttcatgttcttttgttaagggacacactatggtttaatcagaaaaatgtgggctttgcaatcagagatctgggtccataactcacctcctttttctagccgcacagtgctgtgatccctgagacacttctccagttgcttagtataaactgtaatgtccagggctgttatccgatgaaccagtgaatgtaaaaacaccaagtccagggaaggacaggccttacttacacttattattctccttttttataaatgttttcccactcctgtcttcctcatatactttcagactagagtgtcacagagataattactttggaaagcaacctgttggtaacttggtgaattttcgggtgacatttagtagaagagtttgtatttcaacttggatatgccagcatgaccctgcgtcctgttgtttataaagtctgtctgtgctgggcagtagcagttggccagcatttggtgctcaggttagttacagtggcttgcagatgcttatgcagcactcaggacgctgcatttaaacatgctgaatctttgcaggagcttgcagagctagaaagtgccctccaggaacagcatgaggtgaatgcatccctacagcaagcccagggagatctcagcgcctatgaaactgagctagagactcagttaaaactaaaagacgctgaaaccagccagctcaagcaagagttggaaaaactcctaaggcgtactcaggtaagtaggaacatatgccaaatacaaaccaagcagcctgtgctgtctgtccctcttttgagatagcatctcactatataatgtagcccaggctggcctagaatttatggaaatcaccctgcctcagctttgtagtgctggggttataaacatgggccaccacacctggcattgtcttaatacagatatttttaatataatggctatggattaatggaacatataaaggagcatattttgggagtctgatgttctgaaatcaaacaatagccctgttaaaatgtggccagattgtttcatgcccccccccccaacccctgttttagacagcagatgctggggacggtgggcatgaatgccttggtaagttagggtttgataggcctagggttcctttctcagaatagctttaagaacttctatttaaattgactttagattttagtttgctgtttccttttatgattgattgaaagatcactcgtttgttatactggtaaccacctttagaaaggacgcctcattagggcatgggggtgagtgggagtgaaagggatagaaagggaaggtgggtgaccttgacaaagggttcgagagggcagtgtactgcaagatcttcagatgtcagggcaaagaaagtgcagaaagaagataaaagttaagtagcagggtgaaagtgggcaccgtagcctgtccttcatcagagtgagatggtcagcagttaggagcacctgacctctctcctaaggccccaggctggatcccagcacccacatagtggctcacaaccatcaaaaccccagttccagagaattccatgtcctcttctggcctctgcagacacagacatccttgccagcaaacacagacacacaaagtacaaagtgataaatgtaaaggcacatgctctagagtgtgtgtgtgactagaagaggaagcaagagtaggcctgtgctgtagtgattaatgttctgttcttgtcttaccagagatcggtgtcttgccaagtgtcagtattgtgttttccaagagcactacagtttataaaacccttggcaggatcagagtagcaaaaagcagctggttaggggaaagaaattattattattttttaatagcagcaaataaaatttctaaatgccatctctttagaatgaactcctttttgtttttggtttgcccaagctactttgaatgatggtcttttgtacttggtgacaggctttttctctcccccagtgatgcagatataggtcagattagaccttactaaaagtagataaaggcaggtttattagaggcagctctcgggtgggctctctgatctcacaggtagaggtcagtgaagtcattcatccaggttaaagcaagagggttttatagaaccagctaggagctggattgtgtccatacgtggtcaaacactgagtccctgggcaggcactcttgagtgggttgccagaaacagagaagacaagaagtaatatggcatgttagttattagcccggagctttctctgtgtgggtggggttagggaaggaagggcagatggtatttcccagcttgtgcaaggagggtggtgaacaggggttccagcctaacacttgaattttaggtaagtcttggcaaaaatattttaagaaccttgatgtttagttattgaaagccgtactctaacccttaactaccagaactgggcttcaaaccacatagaaagtatagagtataaagaatctaagtttcttggattgttacactttagttatatgaaaccctttgcaaagcttgttggatgcagattccatagatattctgacctgtcagatctgagacagaaactggtcatctgctgttgtgctttattttggtggtttttttccttctcccctctcctgctttccttcttccttttcctctttttccttccttccttccttccttccttcnnnnnnnnnnnnnnnnnnnnnnnnnnnnnnnnnnnnnnnnnnnnnnnnnnnnnnnnnnnnnnnnnnnnnnnnnnnnnnnnnnnnnnnnnnnnnnnnnnnnnnnnnnnnnnnnnnnnnnnnnnnnnnccctccctccctcccttcctctatatctttcacgttcttcctctctgagatcaggtctcatttttgtagcccaggccaacctctccctcctcctgcctcagcctcccaagagctgggaatacagaaatgtaccactgtgccaagcttcatctgcatgttccaaaaatatgtgtatgagtgttgcctgtaggtatgtctgtgtaccacacgcatatttttttgtaacctgcagaggccagcaggtgtctaatcccttggacctggggttatagattgttgtgagctactatgtgggttctagaaattgaacccaggacctctggaagagcaactagtgttcttcacctctgagccatctctctagacccctcatttttaatagatatgtgaaattattttgatacaggtatttgaggaccacagttactgttaaaggtgggtgctggggactacgctaaagactctgatggggtatccaggctgagcaaattctgatatgcattcattattaagtattaatagtcagaagggcatgtagaaaatgatcttgtgtgtgtacgtttcagtgtataaatttagaactatagcaatgcatgatgcatgtataaatgtatatttgctgttttggaatgtgaactttgactgttttgcactttgatactttgcttcctctgatgatagttagagcaatcggtgcttcaaacagaactggagaaggagagagaatccctcagggatgccctgggcaaagcccagtcctcagaagagaaacaacaggagaacaacgagctccgtacacagctgaagcagctgcaggtaaagatctgtgctcgtgggacacccaaagatggtgatggctttactctggcacttagcagcttgggttactaggtgaaaatcaactctgggtgcaatttctttggaacatttgctcctgagtactgggatttagggcgtatacctccatacctgaccttttctttttctttctttttaaaaagatttcttaattatagtcagttctcacagtcttctcagtaaagatgctattaaaactgtaatcagtttttcatctttgtgtgggattatatagatccctatgtgtcttagtggattattaatttttatttttactatgaaaatttaaaatgaccataaaaccggaataatccctttggtccatttcctgatttattcagttgttaacattgtctcattttagtttacctttttctttgaaatattttaaagaaaaattcaaattgggagtagtggctcctgcctttaatccagaattctctaggcagaggcaggtggatttctgtgagttcaaggctagcctggtctacatagtgagttccaggacagtagagctacatagtgagatcttgtctcaaaaaaaagtccaatatattttcacctaaaaatacttactgtgcaacttttactgaaaagaactaaaatcaagtcttcaggggtgccttcatctaaggtataagctgaagttaactttccaaacctggtcctttccatggtctgccttagttagaactagatcctacttggccttctggcctcctgatgtagagtataacttatttgcactcttatctttcttaaaagtcagtttgttaaagtgaactcatgataacataagaaagagatagttcctattgtgtgacaaacttatcctgggaagacacaacacatgtctactcactctaaataggaatgagtatacagaccaaaggatgaataccaccaaagtccaacttggtggtccagtgcattgtatattggggttactttcaggaatatgggtgagggattgcttaataggaacagaaatgactcaaagacagctatattaccaaagcctaccccagcacaggccatgctatacagcctgcagacagctctttccaggtgactcaggtggcctaaaccccttccaggcagctgttctggtcaaaagagacatctttgcagcttagctctgctatcccacagagaggggcatagtgaatctggtcagtttcggggacttcccaaaactatttcgagttctttaccttcctacataaggaacttgcctgaaggatggagtgtttccatctagggaaactattaatacaaaacttgctaagaaccaaagtcctttgctcagtcttttggttgctctctcatttctctttgctaattatctgtgtatatttggcacagcttgaatcacaaccctgaattgatacgttgtttcaagtccaactcttgtacagactttacatgtactgtatcttgcttcaaattatgaagatagtagatcctatttttctagctaattagtaggttgacgggtcttgagtgaggtcacgaatggccaggattaagcaggacagatgtcctgtaatttatgatgggattatgtccgacaaacccactgcaagttgaaaatgtcatatctcaaatgcatttactatacctaacctgaagatgacactgtaacctaactatctttaatatgctcataataaatacattttgaagggactatggccagggagaactggcaaatatggctctggcaggctttgtttttctcccccattccctttgccttgcaaaacaaaacaaaacaaaacaaaacaaaacaaaacattagattgtgttcctaaagctagccaccaaggtttattcctttatttggttatttcctcctcctgaggctaactaccaaggcccagcaatcaaagtattgaaggccatcaactaaaagcccccttagggagctgaagagatgactaggtggttaagcactggctgctcttccaggggtcctgagttcaagtcccagcaaccacatggtggctcacaaccatccatactgggatatggtatcctcttctggcatgtaagcatacattcaggtagagaatttatatacattaggaaggaagaaaggaacccttaaaagccccctttgggtcatctaacatgcccagttaaaatatgctaccacattgtagcccattctaacacagactaccactttttctctacttaaaaattacacctgcaaggtcatttgctgctattttcctgcttgtatcagaaggcagccactttaattttcttccccaacttagtaaaggctctctctgtaaacgggtgtttgggtgtggtttgtgcctcatcagggccagaaggggaacccccactgtgtgcgagagtcttcttgacatttattatagtaaggaaaaattaccttaacacaaagcttattttttaatgaaatactgactctctgatgtgatttatcagaaacacgatggtacacaaaaacacaagaaagactgtaaagaacttggcatctcggtgctctgtagagtggttgttaccctgatggcctgtttgtctatgagctggagcttcttgtgggtctctcacaccacaaagtatggtttcttctgaaagttgaaaagctgctaagtaggggaggacaatctcttgtccagagaaggctgtctcagggtactagggagtcagtctacagatgagacctctaaatgccataggcccttaaaaatgggtgtgcccttgtaggtgctgcactggatgtgcaggagagtgaccctgaggtcgttagggacgttcaggggagtagcattcatcacttaggatatataaacgtttttctttatactgtggggatgttttagcaattctttgtatttgaaggaggcatcatatgagtttcattctgtagccaagatatgtttatgcatttgttagtaatgaattcatttgctggcagataacacatcctttccattttccctctacacaggatgacaacagcctgttaaagaagcagctgaaagagtttcagaatcaccttaaccatgtggttgatggtctgattcacccagaggaagtagcagctcgtgtagacgagctaaggaaaaggttgaaactaggagctggggaaatgaggtaaggggaaacaggaccccgagttagcattaactttccctcttcagagctgtggctgggaccagccatgagcctgtcctgctcgggctctgtaatactgactatgtttctgaaaggctgtgatgcaagattgcttaattctaataatggtgttaaagtatctaagagtctcttgaaagtacatggtgtgtgatcagaaagaagggccacattatagactttgggcagagaaccagtacaaagcaggatagtgtcaagcttatggacactcatccttagcctgtgtctgcagaatggcccagtggttcactacaatggtttccactgataccagtcccttcacacagtgctccctcctcttaatgttagcatgagcatgtttgcgtcaaacttataccttcttgttttttttccatagaatccatagtccttcagatgtcttagggaaaagtcttgctgacctacagaaacagttcagtgaaatccttgcacgatcccagtgggaaaaagaggaagcccaagttagagagaggaagctccatgaagaaatggctctccagcaagagaaactggcgaatggtcaagaggagttcaggcaggcctgcgaaagagcacttgaagccagagtaagaaagggcagagactgcgcggagggaggccttcagcaaatgtttacagcgtgtaaattagcacacccgttattattttccctcacaatacgttttagtgctgtgctaaagtccaatgctgaatatggctattgatgtcaaatctgggcctatttgtaacactggtttccttgttacaatgcaagtgagagatattttataatgagcacaaaaataataccacatttgctaaagtatagtgttgtgccagaatctgtttttaacctactgatgttcatattaaggcaagcattcaaatcccagagaacaagataaaaacatctttggtcactatttagtacaaaaccttgttatgttccctagtaaggaaatgatagctttacagcactcttattttgcttaagacatatagatatgtacgcatgtatgtataaatatgtgtgtttatatgtgtatgtttacatacttgtttatgtgtgtatatgtacataatatatacatacacacacaggcacaagccttaaatcccagcactcaggatatgcaggtgggagcatagtttaaagctagcttggtctgtatatcaagagcttttctcaaaaaaaaaagttcttaattgtatttcctcacagattaagtttgataaaagacaacataatgcaagaatccagcaattagaaaatgaaattcactatttgcaagagaacctaaaaagtatggaaaaaatccaaggccttacagaccttcagcttcaggaagcagatgaagagaaggaaagaattctggcccaactccaggagttagagaaaaaggtgagaagcctagaaaagtaagggacctgtttcccagatccttcctggggacagggtcagaggtggagcccacactcagctgtctgtgttgcctgcacagtgctgagcaggacctcacaggacctcacttgttacttaggcgtggacctgaggctgtagagggaaatgagacttggaaatgggagacccagctgtagggtcatttaggtgatagttaaccaatgataacagaatggtggtaacctgggtacattcatgggaattactttgacactcttcacctcactttgtaataccttggcctctccggtggcattttctcaatcttcctctacttaccccagtgtcatctcctgagtcacattcagaaatttcactctgtacttctgaaaccacagactgcagcatcttgttctaattccagaccctgtctttctggcccccacatgtaaatgcttttccagcctccttgaacttctgattcatcgatctctagcttttcagtctctgctttccttcttgtccagcctaaagtccactgagtcttttttcacccataagtagcttcaagttccttgtctttcttctgtctcgcttccctacaaaacttagatccctactttcttggggtctgcgtgccttggggaagtagagtatcagtctctagcacaatgactagtctcattacagtctcactgtcacatttcacatggcgtcagtctatgccagtaagctcacctcaccccactgtgaggggggcctcctccttctcatctgccctccctctcctctttgcctcagcaagtgatctaccctctaggaaccgttaagtcaccaagacctgttgacttccaccacccttgtctagccatcctcctcctggacaattgctgtgtctacctagctgatttcccaattctacagatgacacaaatccacagagcaatcaacctcccttcgtaaaatggaaaaatggttggagtcagaccctctttgttttccaacctctactattaaagagcaaacttcttaagcctaagaccatttggatttgtccattttgataccctcaaaaatgtcaaggtcttcactatcacttatccaggatctgatacagttattttaaaggtttgcccatctgttatgctactaacagataaggctgggttttgggaggttatttgcttaagtttattcttctgtgtgtgtatgtatatatgtatacatgtatgtatatatgtatttatttttatgtgtaggggtgttttatttgtgtctatgctatgtaccatgtgtgttcctggtgcctgccaagtccagaagagggtgttggattcccaggaacttgagttacaggttttaatctaccatgtgagttttaggaatccaacttgggtcctctggaacagtatcagtgctcttaacctctcccgagttatctctccagctcaacattcttaactaagaaaaacatttaaaagggtttatgtgtagggagctggagagatgactgagctgctaggagcagtgctgataaccatgtggaccagagttccgagtctggcaacctgcacagcaaaccggaatcagtcatacacctgcagtctgagctgtgaagaacgctgacacaagaggatgcttgcacttgctggctccagcccagctcagaaaacacacgccctaagcaagattctgtctcaaagggctcagggactcagtgggaaatgatcgggaaggacatatgataccctcttctgcctctaatctgcacacactgtacacacacacacacacacacacacacacacacaacttgttttaaatctctggtgaagttaatgttcagtgactatttatgaagctcctggtatgcatcaggtactattctagacatgtgctgtatcgggggacagagcctggctctcttggagcttacaccttgatttactgcttttaagtgattcttttacttcatttatgattcttttattttagaagaagcgtgaagatgccagatctcaggaacagtttcttggtttagatgaagaactgaagagtctgaagaaagcggtggctgcttctgataaattagctgcggctgagctcaccattgccaaagaccagctcaagtccctgcacggaactgttgtgagaattaatcaggagcgagcagaggtcggtacccaagtcagtcaggatgtgctcatcagcactgtctcagagtgaagaagtgtgcgttactgatccttggtgcaaactggtcaccttacaagccactgtgacactgtttgcttttctgttgggtttggtttggttcaagacagggtttctctgtgtagccctggctgtcctggaactactctgctagcctagaactcacaaagatatgcctgcctctgcctcctgagagctgagattaaaggtgtgtactaccaccgctgagtctgtctgcttttcttaagaaccagtggttatattccatcacaactcccaagaatctatttggagccatcaaatgaatattaaaggataaccgactccttggagaagttactgtcatatacatgctgggattccagctttgaaggcttgccattcagtctctctgaacctcaaattgttttctcctcctcttcttcctcctccttccttttctccttctttttctacttttctcctcctcttcctcttcctcctcttcttcttcttctgctgctgctgcttgttttcttttttttttttaagataggatttctctgtgtagccttgactatcctagaaatagctatgtagactaggctggcctggaactgacagggatccactagcctctgcctctcaagttctgggattaggggtgagtgccaccatgctcatcttgagccttaaaatgtttattttgtgtatatatatgaaatcctactgtacaggctgttagtgctctgtgcagtaatggtgttgatgctcagtaggacacagattttaatgagcttgagatagtagattatagtaggaaaaaatgatgaatgagaccccagaaagacagccatggcaggctaggataatgaagagggagtctttattcctcttgcaaaaaaccctccacctaccccagggtggatcaggctttgcaccacgtgtgaaggcgtaagccgggctggttataggatgggagcaggggatcactctgagaggaaggaggactggagatgagcatttgtgacagcagtccccttctcacgatctgtccataggagctgcaggaggcagagaggttcagcagagaggccatgcaagcagccaaggacctgagcagagcggaggcagagatcgagctcctgcagcaccttctcagggagagagagggccaggtcagtgctggtacccaaggtggcctctggctagctgctctgggttgctaagactgagcactgcaggcgattgctcaaagcaccgaagtacatccagtaggcagcactttagccttgcctgctcagtgccatgaaaatgaaaggggtaagatggtttcctcattggtaaaaagtaaaaaaaaaaagaagataggcttcttagttacacgtgtaaatgcagctgagcgtgctcattgacactttgtgtatggtttttttaatagttccgagatgagatggaaaatgcagatttaggtgctaaaggagcaaactcccagctgctagagattgaggcgctgaacgaggccatggcgaagcaaagagctgagatcacgagactccgggatgtattaaacctcacgggggcaggtaaagtactgttgggctttgattcgggatggtgctgtcattatgaaactcaagtgccttctcctgcctgtagagaaaagcacttagctgaggaagtcaactccatgcctgatctagagagtcatggctttcctgataagttaaagaatttaaaaagcattttagagtgtggtactaggggatttgattttagcaagacaaagtgtttatacatctgttaactttttgcaaattactttataatcgatggacagaaagatgttttcttggtgttcaacaaaaaataatttaattatccaagggcaggcttaaagtcagatttggagacatggtagattctgttggctctcctgaagtctcttttctgtattgggagagaaaggaagtctgtgactgcgtggcagcttcatacagtggctttcctttccaggtacaaaaggaggcattgagaacgtgttagaggaaatcgctgagctccggcatgcagtctctgctcagaacgagtacatcagcagcatggcagatcctttcagaagacaaggctggtggtactttatgccaccagcaccatcctcaaaagtaggaatcctatgttgctagaagtatatactgagtttttctccttccccaaatttgttagcaggtgctgaaacacttttctgctgagacatacacttaggttcttcagtgttgtgtgttatttaagatgtaaaaatcgagctatcccacagaaaatagtgcttgcctttttatggccagtgtcaagaagtagataaaaggttaggatggcctaaggccaaagagctgactgagaatgattgtagaattgtgcagaggtgtggacaggataatgggtgcctaggtttcatttccttcttaaaacaatccttgggtgttcaccagtctaggccagtgctaggctgtattagagtgctgtgatggctgatacagccctgccctcggaactcatgggccgtgtgagtggaattacagaacagtgacatgctgtgacagtaggtttgccctgtgtgtgtgctctaggtacagagaggttggtttcagggattcttcttgtgagcaagttcaggaaggaagcggaatagatgaggctgtgagctgagcagtgagcgggcacccagcggggtgttaagagggagacacagcgtgtgtaaagaggaaggttgctgtggctctagtgaggaaccttgagggttagatggtttgctgggagggctgaagcatgagctgaaaggtagattggggctgtcttagttactttctgctgctgtgataaagcatgaccaacactgctcagagaataaagcgtttccttgggctctggttccaaaggttaaaagtctgtcgtggctgggaggcatggcggcggggacagacctgtgaaagtgcacatcttgaaccacagatacagagagcacattgggaatggtgaaaggctttgagcccccaggcctgcctccagcaaggccacagctccccaaacagcacaccagctagggactgggtgttcaaatacaagagcctatggggcatcttcattaaacccacggggccgtcctttacaaggggccattctctacgtcatggggaatgagattactgttagtagactcagtagatcagagagtgttgtagctgagcacaggatagagttacagcaaggtgagctttctgtgcactatatgaacacccacgtgaaagacagaagagaccagagctagatgagtggagctggaaagaaggtacaattaaggggtgagcttgctacctgagcttagacatgaggagtggatctaagcaggacttatccaaagcagagggccttaatgacacttctgagagtcactgtagggcaatagcaaggagannnnnnnnnnnnnnnnnnnntcactgtagggcaatagcaaggagatgcacctcggacaccagggtcccagggctctgactgtagtcataacctacatgcagaatacccccagaaatgtgaaggaagccaacaccctgtcaccaaggaagagacaacactgtccgcctgtgctgagtgtgctcctggagccgagacctacacactgggaagcagggagggaggggtagcatgctcccagagaacactgcgctccagcttccttgaaggtgttgggtcccttacctcagctgctggcccttgaggacaaggcagaggagaaaccatggcagtgccgagtgcaggtgtgaggaaggggcactcaggtctagtcacttagaggacttacttctctcttatggcaagttgtgccataaaataaattcacacagccaggtaacacgccgttaccaccacagtaccacgaggacccgtgtgcccagagaacggccaaaagagcggggtgggaaatggacgctattgcataacttcttgaagagagcccatctctttcacagagcagtctgacaggactccagctactgcttccataatcctcgctgctcagcctacctgacactactgtgtcagatttaatatgctgagccatgtgtgtggactgtagtttatacctgtaatcactttttatttctatctgtaagaaatgagcggcatgataaggaagtaacaaattctttcttagtttccatgtatctcgccttggctgtccactttgacgtgtctaaaggtcagcctttccatgataggcagtgtctcctatcgctccaggtttccagccatagttctcaggccaccaaggactccggtttgggtctaaagtacacagcctcaactcctcttagaaaaccacagcctggacagcaagaagaaaaggacagcagtggacctctgcctgcttcagggtactgggtctactcccccatcagaagcacgctgcataagtcattttcaaagagaggtaggccgcattgcataaggaaagcttcacttttcttacctagttaataacctcttaccgttccttgaaataaatagatgcatcccaaagtcttttcttactcaggtatcctgtgggaccctgtattgttgactagtaacctatcttcccatagggtttctatctaaagcagtgtttctcaacctgtgggtcacagctactttggagtcaaatgaccttttcacagatgtcctacatattagatctttacaattggtaacagtagcaaaattacagttgtgatgtagcaatgaaaataattttacagttgggggttaccacatgaggaacggtgttagtgggttacagcattaggaaggctaagctgctgatctatagatacctgcagcatgcccgcttctcggggctctctgcctttgttttcagtgctgtgggttgagcacagggcctagcatatgccaccaagttacagtctcacccctacacctccacattttaaaccacttttctgtaatcccaagccatcctgtggtttagtgagacggctcactgcatggttcttccctccactctccttcttccattccagctgagcagcgtcttggcttatgcttctgagtcaggagcattgtaccatttattttatcatgactttactaaaattgtcagaggttagtcttctaacctctgcacaaagagtaagacttggatccgtctaagctcttgtattgtatagctctgtggccatagtccaatcattttgctgctctgagacagttgatctacatgacttggtagtgctccattttgatgatctgttaattaaggaagtgtttcctgggataggaatgtatctcattgttaatataacccctaacagcacaaaagcaaacaaacagggactattactgggaaagtgcctactgtgtgcttgctttattgtcgggttagcagacatagcccttgcctttagggaataagaaagaagtaatccatcaaattagagtggcacatgtggcggcaatcaatttagagttctgtctgacctaacacatctctgttggtattttatatagtatgaagcacatatgcaaatgattgctgaatacattaataattaatggtgactaaatatgagatgttggcttctgaaaacactttgtattgatctgcttcttatacctacagctgatcattttcacagttgttttccatctccagtgtcttgattgaagtactgttgtttcttcctaaatctgtttttctcctttcctgtttatgtcttagaagatgcagacagtggaggagatagccaggaagaaagtggactggatgaccaggaggaacccccatttgtgcctccccctgggtacataatgtatactgtacttcctgatggttctcctgtaccccagggagtggccctgtatgcaccatcgcctccattgcccaacagcagccatcctctgacccccggcactgtggtttatgggccacctcctgctggggcccccatcatatacggacctcctcctgccaacttcgctgttccccttgtccccgcgggtgtgcagcattgcaacatcccagagcaccataacctagtaagtggggactgcaacttcctccatattgtaccatgcattagtgtttatataaagctaccacatactagtacctgtagcttatgcatatgtaagtatgctccacatgtacacatgtgcctgtatatgcagatatgtataaacagcatgcagaaattatctctggttaactgatgattataaattatttcattacttttatatggacatttgagttttgttttcctatttgatgttagtaatacccagtactttacactcttaggattttattagttttaattacatatgtatgtgtgttggggaaggtgtggtgccctcagtcagaagtcagagtcaaagccctggagctggagttattggcaattgtaagaatcctggtgtgggttctgggagaagaacctaagtcctctgaaagaacatttgtgtgacagtttcccaggcgacacaacaaacatatctactcaccccagataggtggctacaacagactaaagtgcagacaccagcttagtgaaccagtgagtttgattggggttgcttacgggcagtaactcccagagctgcatctgcacggctaactccagcaggttcacaaaatgtgggacatgaagcacattgcacagccagcaggcagctcagcaggttgagagcggcccttccaaagtgactccctcctctaagcctttcgcaggcagtgcattggtttctgcttcatccaggcagctggcctggtctcagtgcctttttgcagctctcagcttgtgctgaaaggaaggggcaaagggaatctggtcactttcagagacgccctgaagctattttgagttctttaccttcctgcttaaggggctttctgcaggatggaaaatttcagtctaggaggaaactgtcacacacagaacagtattactgagctatctcagtctctacaaatgattaagcagcattttaatatctatctaccgtttctttatttgaagatgttttaggtgactgtgacttcgtacatgtgccttgtattcttgttgtaggctagatcccagtctgattgttttctaactttttggttctagcttactaaacttcatcccagctcctcttttgtgcttttggggccttcgttcttcttccaactcaccactgagggaatagtgaggagaggatagtgttctggccacagtccctgctggcaggccacacttagtccataggcccccatgcaggaatcactcaggttctctgcggctttatgctgtacactccgcttgtgagagttctgtctgagcacttaggaacactctgccagattgctttgtctctccagcagtgcatgactcgccagcctctcttgtgctttccgacctcctcacactttaccttcttgtttcttgagactgggtctcccttattattattattttttacaaaatgtgggcaaaatacctcttcttctgggaacttatttaaacagttctcccggcgcccagagtggagagagacttcagtttgtctcttctgttagatgctaaactctggagtcagagaggggtggtaaatttcaaacacatggttatactgatggaagagttatgtgagtctgtcagtttcatctgtgtcatgtggcttgactcaatttttctttccatactgaagacttagactctcccactatctttcaggataaccactttaaccaattagtttcaacttttgacagcaaagcaggagagacaccctctggcatttctataatgcattcactttctgcgttcaggagaatgaagtgtctagactagaagacataatgcagcacttaaaatcaaaacagcgggaagagcggcggcagaaagcatccacgcagcattctgaggaagaagtggatgggctgcaccgtgatattgatgaccttttgcaagagaagaaagaattagaacttgaagtagaagaattacatagaactattgagagacatcaacaacgaaagtaagcattcgccattttaattttataattcaaagggtataatatcagtgttgacagacattctcagtcagcattgccttgtaaatcattctctcctctcgttttagaaatgtcctagatcataactgcaaaataataaatgttggccatgtataggtggagctggcaataggaactaagaaacagaatttaattccacttaacttacaacccacatggtaaataccatttaggacagcgcacacctaaggccacctggttaataattcagatcagctctttctatagttgtctttgaacagcacaatcattttccttcccatccaccatagccaaagtagacaacaggaattccgaccctcgttctctaaggcattggtttgatttccttgtccttttgactttgcatacaaaaagctaactaaccctttctgttatttctatgctgtggcctttaattgggggaattctcgaccgccataggaggttccatacttgccaccatttttagaatctttctctccagtctgtggagaaaacactgtgattcagtgtcagctgcccgactctgttactgttcagcctcacacagtgcttggcctgaacctgtggtctccccacggaccactttgctctgcctctgcaccttcacatgccttccccaagccctgtctgtctgtcctgcctttcaaaacaaaagtgacgatgggcagtcagcggaggtggctcaggctttaagttaaagcacttgttgctttcgcagagggtgcaggttcaatttccagcacccacatagtggctcatacgcgtctataactccagtttcaggagatacagcctcttctgaactcttgggtaccaggcactcagtggtgcacatgcagacatgcaagcaaaacatttatacacataaaaccttttaaaaacatgaaaggtaaggggtcccttttgaagtaggccttctttctcctcaggtatcttgtacagtgcagggttagtcaccattagcatagtcctgctggagcagtgctgtgaccagccagagtcactgaggggaatagccggccctccatctgtgggcgcctgtgtttagcatggggtcagctagttcacatgcctctgttgtctgctcgggtacatgaaatgctgtcttctgtgctagtccatgagttatggcagttccctagcttttgtcatttaatgtagaccagcctgggcctcagtgtgatagggaggcctgtgaggcaggcagagtgagagagacgtgaccactgctgtctaggagtggacggctctcgtgagagccacactgaggagactggaacttgcttcttgcttgtggggggataaagcttcttttcacgtgcgtggacattttgggaagaggacagagtgggcagggcataggcccacttctcccacggtagcagtataaatgattactccaggaaaattgggtaacacttagtcagagaaaagcatccatgtgctgagtttgatttcatgttttttctgccaagcagcccattttcagataattttgtcttgttagcctcgagttactgaattttgtgtcatgactttttgccaaatcttttatgacagttgtattccaacataaagaagtcagtcacaaaacagcacagtgtgtggagttgcatgctctggggctgtccttgaggactaagggactgggagtttttgtgtagtcacttcctttatctctactcttcaggaaaatgatgtggttatgctgtctcggccagatgctgacccaagtccatcaagccttgtgacatagtgtgcttttactgccaggaatactctgtgtttataataaaaatgtattttgaacatgtagctactctcttaaaaagtcagcaagttccttagctgggtgttgggtggcacatacttataatcccagcacttgagagacaagggcaggcagatctctgagttcgaggccaatctgatgtccagagtgagttccaggacagccagggcaacacagagaaaccctgcctccaaaacaaagcaaaaccaaaacacagtaaaaatttgaacattcttcataggctatcaatgtccgtattgcctgtgtttaaaatcttttgatatttatgtaatttttagggacttcattgatggacatgttgagaatcttatgactgaactagaaatagaaaagtctctcaaacatcatgaggatatcgtagatgaaattgagtgcctagagaaaactctcctgaaacgtcgctcggaactcagggaagctgaccgacttctggcggaagccgagaatgagcttgcatgcaccaaggagaaggtgtgtctagtgtgcttcaggctggccctctaggggacacaggcaacctcctgctcttcacctaaaactggaaagcaatggtggcaaagagcacgctgtccgagctgggcatctgagcaagtcacctaggtccgctgactttgctaaccttgtctgtaaattcaagctaagaatgtgtggtctgttgagtgtggattaaatgcatgctttagattccagacactgtgctgtttagttcccagcatgtcctgcttgcccggctgagtgtgttgtggggcagaggtgaggtggttgtttgtttggtttgacttcggacttttcaatctgcgtctttttaaataacaaatcgattgttacagaaatcttccttcatcaagttggtaacagaagtaatgatctattttcaatttctgggtcatagatttctattcatttaggttcagccaagttgaaattgaaagaaagaaaggttctgagatgttctttgctggcacgttacctctggactaccgagtgagtggtagtagcattctttaagacacaatgcagcataaacccaaagagggaaagtgacttcctaggtcttcatgaacgccatttcctttagcttccctggcagccctgggacgtggtgttaactcagcttacacatgcagcccagagtcacatagttgaagctctgccttctctagagttctttagttaaatgagaattccagagaaaaaaaggccctggcacacaaagtacctcaggaactgtttttactttgttagttcaacttggatcaatttaagttaatagaaacccgtagttgtaactgagtgattggcttcacctattacattctgtgtatcatgactgatgttacagaaacacagctctcacctcaaagaggtacaagataatttatcctggagccaatggcctgacatttcatgttctgatgtattaatagtttcataaagattttatagtaacaacatacaaaaaagccataacccatgacattttcaaatgcattggtgggaacattagagaggcgggggcagccaggcagagactgcagctgcgggctttgggtactgtctggaagcctgctggtaagttcatagagcccaaacggtttttggttttgttttttaatctgtttttcaggatgttgaatcagctttctctgctagtcaacagggtgttggtcaccaccagaggtggacaaggaatgcctccttaggaggctgaagctaacggagtataaattgcagtgagtctgtggacctgcagacttccaacccctccacatcattacagtccatctgcctttacaggcatagctcctctcccggaattcttcacatggttctaaatgagaacaaggaaatcctcatgtctcttcctatgggcagtccttttactgtaaatgttaggttgctgtggttatgtaggttatataggtgctatgggactagagaaaacatcttccctgtatttatgttatgtaggtgttatggaactagagaaaacatatctcctatatttgttttaatcagtgaccttggcagtagacacatagaggcagagtgaccacagtggagacactctcctccaagggactcccctaagtagatgatgaaccctgcccaaggctttgctaatgaaccagcagaaagcagctgtctgaagagaagcggtgatatgtctagcattgtggatcctgccgaagagatgacacccagttaatagacagatttcacatgcagccacatctgactctggagactgtttgtgagtcagtgcaaactaaaatcttagatatattaaacttcttactctagatgaatcaggaaaccaagttgattttttgaaagtgttttttgccaaatcttgcataggaggacttctatgaagtctaaagacttcaaagtaagtcgccatcacaaagtgagggtcctttcataatgtctcaagtaagaagaatctgtgtggatggaggcttgccattgtcatttagttggctaggtttgataatcacatttttggaataaaaaggtatctccattctcttcatcttcagatgacttttttcataaacgctccatctttgttgacacaaacatagttttatatagttcctctcatagtgcttataccatttaagatttatttttggtccagcatattctaacatctgcatgctgcaacattgtcattttaaagactaaatagcattctgttttattacactatttttatttgtcaagattcatcttatctcgttacatttttacacagtaattatttgcttctggataattttctaagcattagattcagagcaaaggaatgtttttacatttttctggttttaatcttgttttctaagagttgtaccagttaatactgccaataactgtagtgagtactgcagccgaattatttttaatggccgtttcttttctagacaaagagtgctgttgaaaaattcactgatgccaagagaaatttattacaaaccgagtcagacgctgaggcactagaaaagagagcccaggagactgcacttaaccttgtgaaagcagagcagcagctaaggtgggtggagccagggcctctgaggtgggtggagctcgggccttgggtgggtggggcccaggtgctgagggctcaggcactcaggggaatggttcttccatgctatgccctaagggccagggggatgaatgctccattgtagactgctccaggctgatgcagaggacttggagcagcacaaaatcaaacaagaagaaatcttgaaagaaataaacaaagttgtagcagccaaagatgccgatttccagtgtctaaacgagaagaaggaaaaactgacagaagagtaaggcctttgaggggtaggggtggggtggggtgggatggaatagaatgggaagagagtgttctggagcagctgtgggcatctggctcctctagaggagggctgctgaagtcctgccctgccatgtaggcttcagagtctgcagagagacatcaaggcagcgcaacacagtgaggatcaccaccttcaggtccttagagagtctgagactctccttcaggccaagagagctgagctggaaacactgaaaagccaggtatgacagcagatacctggaaacgactgtttttaaacgtattttggattgctggatcaggtttatttggttgtagaagagatggaaaactataaactgaagtattaagaatacatgtgtctggatatcatccttagtgaggtaacccaatcacaaaagaagtcattagatatccactcactgatacgtggatattagcccagaaacatagaacacccaagatacaatttgcaaaacacaggaaaatcaagaagagggaaggccaatgggtggatacttcattcctccttagaatagggaacaaaatacccatgaaaggagttacagagacaaagtttggagctaagatgaaaggatggaccatccagagattacccagggatccatcccataatcagccaccaaacccagacactattgcatatgccagcaagattttgctgaagggaccctggtataactgtctcatatgaggctatgccagtagtgcctggcaaatacagaagtggatgctcatagtcatctataggatggaacacagggcccccgatggaggaactagagaaagcacccaaggagctgaaggggtctgcaaccctataggtggaacaacaatatgaactaatcagtacccccagagcgcgtgtctctagctgcatatgtagcagaagatggcctagttggccatcattgggaagagaggccccttggtattgcaaactttatatgcctcagtacaggggaaagccagggtcaagaaatgggagtgggtgggtaggggagcagggttggggtgggggggggtgatgtatagggaactttcaggatagcatttgaaatgtatataaagaaaatatatagaaagaaagaaggaaaagaaagaaagagagagagagagaaagaaagaaagagagaaagagaaagagagagaataaagcaggctcaaggccaatggggggtgtggggagaatacatgtgtccttgagtcaaacttgccatctcccttttcaggtgacaagccagcagcaggagttggctgtcctggactcagagttggggcatagaagggaggagctgcttctactccaggacagcctcgcccaggcaaaagctgacctccaggaagccctgacactgggggagacggaagttgctgagaagtgcagtcacattagggtatggttgctgtaagctttcttagaagtccagggcagtactgaggtttattttaaagtgttctgagatagaagtgccccctatagcaccatttggggtgttaatgtattggtgctgaggcagtcatgtggcctctgagtacactctgggttctcttgtttcttggctttctcatgtgtttcctgtccagggatgcccttatcacagtcataggcaacatcgcatcctgcctgtttctcgtggttcagccacatgcaacctcctgggatttttgttagtttgtttgtttttgtttttgtttctaagcagctcttaaggagtttctttatcttgcatttaataatagctgcctatgtcctgagcacctcagtttgtgactgtctgtgcctccagccttctgcctctgacagtcactgaggctgggaacagccttgcatggggtaattgcacaaacacatctgcatgaacataggttatttcttcatattacacagtaggtgctgctgcaaaatacagcactgttcttgtaccaaaggcaaaaaattataatttaatataaattaaattacaaattagatatatgaaatagaataataacagaactgactggtgtaaaggggattttgatttgtaatttacagagaagctgacttttatttaaacacaggaagtaaaatcacttctggaagaactaagttttcagaaaggagaactgaatgtccacatcagtgaaaagaagactcagctcgcacttatacagcaggagatggagaaagaggaaaagaatcttcaggtggttttacagcagctgtcgagacataagactggtgagtttaaagagcaagtcgcagaatgtgaggctggccacatctgccctgcaggtcacagcgaagtgcacctggccaagttcacctctgaactgtaagctcagtaatgagcaaattctaaaaggaactcgatgtttcctgccattcagttcagtttgctaaggattattaaagcaattaagcatattggtagctggtgagagcagggaaggactctcacagctggtgagagaggaactgagatgcttggccagggcttcagcactccaaacattcaagcttgtaaaaccaaagagccaattgctattcatccagagatctctatccgtcctttatgtgtgccacagcaagacttacacttaggaacctggaaagaaaaggcttatgtttaccctttaatgccacgtaaaactagagtaaacatctgagataagtcgtgagtgtgggagagagcccacttatttacttactcatgttaccctgtttccttttgtgtgtgcatccccgtgtatgtgcacagcccacaggagaccatcccatgtcctgttgggtcactatcttatgctgttgagacaagggctctcactcagccaggtcccagtgatcgcttgtctctgcacaccctcaacacatatgcagagcactgcagttacagatgtccaccagcaagtcccagtgactcttctgcctctgccccgcacccccaccctacacagccacacagggggtcactggtacacacacagccacacagggggtcactggtacacgcatagccacacgcaactttttgtgtgggtgctggcagtcaaacctgggtcctcatacttatatagcaaatgcttttacctactgtgtcctggacacctgactaggtcaggaagagaatgaggaaaaagcagatatacagtctggcacctagagaagcgggggatcaggtgggtcatgatcactctgctagagcagtaccagttacccagcagcccaggtccccagtttgttatgcacagcagtacagctcagcagtacagaattttgtatagcctgtttggaattgtgccagtgttgtttaggcagcgtgtggttgagacttggtgagtatagtgcccctatcatagctagaagatcactctcactatagacttcctggtcctctggctctcgtattttctaccttctcttctgaggttctggagctcttctgagatgttccagaggggcacaggctcctaggaagtctctataggcctggttagcagtctggggctataagcagctggggggacgcagctgcagtagctagcatatgtacacaccatcagcactcatactcaggctaggggaagcaaggcttcgctctgtcaagtcaacttcctgtccagagctttcatgactgcctgaggctcttagatcatcacctttgactttgggtctgaggccatgtcgtgtcaaacagtgtacttctaaaataaaacaccagccggacagtggtggtgcacacctttaatcctagcacttgggaggcagaggcgggcgaatttctgagttcgaggccagcctggtctgcagagtgagtgccagtacagtcagggctatacagagaaaccttgtctcgaaaaatctaaataaataaataaataaaacaaaacaccataaagtgctgtcatagtagtcagcttttgagttattacattgtcgtgtgtgtgtgtgtgtgtgtgtgtgtgtgtgtgtgtgtgtgaagggggggaggagggagagagagggagagacagacagagagagggggagacaagacaatcaaacaaaatggacatggagtcggaacagatttggggagttggttccctcatactcatcccaggtcatcatgtcaccaccccttctagaaatttcttagcacatttaccattgggctccttttctagattttctgcagagaacaaatacacatagtgtaaaatttttcctatcttttcatacagagatgtggatataaatgctcctagagtcggggcattgtaactgtttttgttacagtgtatttaacaaattagtgttggattttttattttgtttgtttttgtttttgtttttttgagacagggtttctcagagatccacctgcctctgtctctcgagtgctgggattaaagatgtgcactgccagtgcccagcacaaattaaattttttttttttttttttttggtttttcgagacagggtttctctttatagctctggctgtcctggaactcactttgtagaccaggctggcctcaaactcagaaatccacctgcctctgcctcccgagtgctgggattaaaggcgtgcgccaccacgcccggccgcaaattaatgtttttaacagtactttcaaaaaggttttttctttacaaataaaattaataccatttaggcaacacagcaaaaaatttttttctctttctggtcagtgaacaaggagttatagtttgttctgtttagtttccagttcccaaaccctgaccctgttttgtctctgtcagaactaaagaatgttgcagacatactgcagcttgaaaccagcgagctccaaggtctgaagctccagcatgaccagaaggtggtggagctggagaaggcgcaggtggacgtgctggaggtacggaggaaagaacgcctctgagccgcggccaccctcctcagcctttctctttcaaggtgtctgaatcttctctctcactcaggagaaactagagctggagaatttgcagcaggcaacgcagcagcagagaagggagctagagcggcagagacagctcctggagagagacaggcgggagacagagcgagtgagggcagagagccaggccctgcagtcctgcgtcgaatgtctgagtaaagaaaaggaggatctccaaggacagtgcgagagctgggaaaagaagtcttcccacgcccaaaggtaagggcaaggatagagacatgggggcaaccatgagaacagagagatgctcatgggggtgcattctgtaatcccagcacccaccaagtggaggcaggagtgttgctgtggatttgagaccaccatggcctacacagtaggctgcaagccatagtgccacttagtcagaacctatctcaagacaacagcagaagccacatgcggtggtgcacacctttaaccccagcactcaggaagcggaagcgtcagatctccgagttcaaggcctatggagcgagttccaggataagtcagggctacacagaaaaaccatcttaaacaaacaacaaaagagcaaagatttaaaaaaaaaaacaaaacaacagaaacccagaaaaaccagagttcactctctaggtctccatgttaaagcagaaatagtagacacggtgacagatgctgtaatccagcaatggggattacatagagacaactgcatctctgggcactagcctaccctccatgagctgcaggccagtgagaccctgactctaaagggaaaagaagagcagctcttagacccccaagtttgtcctccaggacacacagtcttttgctggaaataagtagaaaggaagattttgttcactgctctaagaagacagattgttctcagattgatcttgtcttagggtttctattcctgcacaaacatcatgaccaagaagcaagttggggaggaaagggtttattcagtttacacttccacattgctgttcatcaccaaggaagtcagggtggaggtaagtggacccaactggccagccagtttagccaacagagtgagttccaggttcagtgagagagcatctgtttcacacgtgcctgtacaggtaagcacaccttacatgcgtgtgctcacacaggcacataaaattaaacaaataaaacaagacatttaaagctaaatgtcttgttttatttgtttaattttatggacagtggaggtgaggattcaaagcctggcaatgctgatgtccataggtcattccctggaacctaataaggaggacagatgctctgggtatgcatctgagatcccagcactcttgtggcaagacaggaagcggggatagaaaatcacctggaagccacatgccagctggcctggagaacatagcagagcagaaacacgagtcagggcaaagaaccagctcccagagcctgtcctctgccctgtgctcacatgaatgcacagtgataagaaacacgtgatcgtactaggaactacacaggtgtggtggcactcaggaggcagaggcaggtggatctctgtgagttcgaggctggcctagtctactacatagttctaggatagccagggatatgtagaaagaccctctctcaaaaagccaaaaataaaataaaattaaaaacaaaaactggacatttaaaggatcactctaaaatataatattaaaactaaagaaaaatacatgacaacagttaggagaaaagagtttgaacctggtatgtaacataggacttagggccacaaacgtctggtgtaaaaagtcttccaaacttgataagaaataacctgttttcttaaatgggaaaaacatttgaacttatatttttatagaagatatataatggaaaataagcatgagggaaatccaggttaaaaccacagttgataatgtgcctgctagaatggctgatacccgaagacccattgtacatgtagttctggcgtcttccatctccagccttaccctcaccccggtgacgtccactgtctgtgcactgtggaaggcagggctgccctcatccacgttagtgtgggtgttttctgtctaacagtccactttattctgtggtagagttctagcagccacagaagaaagcaacaaaatggagcagtccaaccttgggaagttggaactgagtgtcagaaagctgcggcaggagctggagcagctgagccaagacaagcttgccctacacagtgaggtagccgaggtgcagcagcagctacaaggtaaggaagaggctgaactggaggccgggctccacccacagacttccctccgctgacgtgattggtgcagaatggtgtaaaattagattatggatttaattatagcactctgtgaacatactaagtctaagttgtacacgttaagacacacatggtacatgaatttcatcttaagctggcttttaaaattttaacttatgtttcttagggaacagtttaaaaatagagcaaaaaaggttaaattaatacaaattacttttgggccagtgaggtggttcagtaggtaaagagcacttgccaccaaacctgacaggctgagttctgtcgttcaagagcacactaaaaggagagacctgggaactgacaccgagatgtggcccttcatccttcacactggtgcatggcacatgttcacactcactcccacacacagtacacacactaatgagctgacatcaccctcaggtcataaccgtgactatgtatgtggggggggggggggttgaaggcaatggtaaaaatgtcttttattaccaaataattttttaggagaaatggctaagtatttatagctaatgatgtatttttttgagcctttattatgttctagtcatgatgtatgtactgtctcatttaattcacataacaccaatagatctggtgacacaccagtaactccagcactcagtaggaaaaggcaggagaaacgcaagttcaaagctaactgggccacatcatgagactgtatcaaaaataaaaacttcatagcatttttgacatagaaccagtatttcatctatttacagatggtgctattgggggttttcttgctatttgctcaagatcacatagttagtaatagatagcaatgctgtctatacattgtcttcatgaaagagtgtaccaagtcttacgtttccagcagcaatgtagaatatacttgttttgtttttttgtttgtttgttttttcaagacaaggtttctctgtagccctggctgtcctggaactcactctgtagaccaggctggcctcgaactcagaaatccgcctgcctctgcctcccaagtgctgggattaaaggcatgcgccaccacgcccggccaaatatacttgtttttaaaccatgcatctcaccaacattattagttaaatgtttatgagattctttaatatagaaacctttttaaatcccacaaggttatatatataaccttgatgtcttttggcatcattgatttaacagaaacaaatgtaaattcagttccaatgtactttgaagggggatccagtatgtaaacatatatgctatatgtatacttgcaaatagcattttatgaaaatgttttggtaggtaaacaggaagccataaactctctgcaggaggaactggatagcacccaagaccatttggacctagcaaagcaggtaaggctcaaaatataattggctttttacagttcgcactgcagcctcatagggctcctcacacagcatcataaggtcgtctacacagccccatagaccacccacactccctcacacagcaccagagggcctccttacccagcacagccttcagataaggctttggtccttaggtggttctctgatctatttcagctcttgattcatttactcaaagctaagaagaagtaaggtagtagttagaccaaagtcaaacagcagttcaaagaagccttaccgaggatgctgggatgtagggatccgtgtgcagagcagctgtccattcagagcagggtctggtcaggtgttgactagagcagctgtggccctgtgcttctgatgaccttgctctaggtgactctgagtcagcctgtgagaatagggctacagtttgtgtttcagaggacttcaagcaaatgagatgaaacacctaatctttcttctgtacctccagggttctgtgtttctaagacataaaacttttagaacaaaaacctgtttacttttaagatgtcagtctttttttaaagatttatttatttatttcatgtatgtgggtatactgtccttgtcttcaggcacaccagaagagggtataggatcccattacagatggttgtgagccaccatgtggttgctgggaattgaactcagaacccctggaagaacagtcagtgctcttaaccactgagccacctctccagcccccaagatgttagattcttaaatttctctgtgttaaaattttttcagaattttttctaagttttgaacttgtctgaatatttgatacagtaacaaaggcagattaattcttgagtccagcaccttcattttctcgacagccctgggttacttgcagagcagcgtttattcctgcctcggtggcaaggccgggaagctctcactgtggtctcaccatctacttgttaggcgctaagacaaggaaagccaggaattaacttctagtcctgggtaccttcctctaagtttgctgagaggataaaggaggtggcacttttcagacttggtgggctctggactgacaccgtcaccttaggaagtggctctgtgaggtgtttccgtgtgttcttttgcctaaaggacctgatccacaccaccaagtgccagaacgagttgctcaatgagcagacgcagctgcaggaggacatcagcaaatggatggccaggttagagagctgccagaaagagacggagacaaaggaacagcaagtccagcagctccaggatgagatcagagagagcaagctccggctggaccagcaggagatggtactgtgctcagaggggtactcgcttcccggggctctgggcttcccacctccccacccaggtcacactgcccatgtgcaccttctctgggactctttggttaatataactgataggttgttaagtcatccagcactcatcctgtaaagagcttagtggccacatgctagttaattagcgacctgtatcttctcacagtggccaggtggcttcatcgttacagaggcactggcatttgttctgtctgtctgtctgtctgtctgtctgtctccccttctctgtaagcgcttctctctttggaactggaatctgaggatcatctgggacatttgttcttttaatgatcgactcaggttattgtctctctattcagatgtttcaaaaactccagaaagaaagagaacgtgaggagcagaagttcgaggctggtaaagtgacgctggagcagcagcagaggcagctggagaaggagctgacggaccagaaaagcaggctgaagcagctgctcacagacgtgtcggcagctgaaggacgcctgggaaccctgcaggaagaggagcggcgcattgagggcctggagaggatgctgtcccaggccagtaagtccacggccaccatccagggaagggtgggagcggggctgtcctggtcgtctggtgaagtatgtgaggaagacccagacctggccaccccaggaggaggcaggagagccaaagcaggaaggaaggcaacagccctgggaaggatggccaaggacgcagggaggtagggcgaatgtatctttatggtgaagtttgaccctgagactggccaatgtgtctcttcgtgcccttgaaccgtgcacaggaaagcaggacattacagtgggatgttagagtctctgaaggacaagttatttgggagtagtgacctcagctattgggaaacacagtgtcagcagccgaaggttgaatgcatgagctaagctagagttggatttactttggagtcagtttgctctcccttggcgaaactttcttgagcctgtggagtaggccgcagacttgtgcgagccagtactagagggaaacagcagagtagggaacattccactcactaacaggcagcctgcactaaggagcacagggctctgcccacagctggcccagggccacggccaaccctactaagtgtgcacactcacattccagaacagcagctttcagaacgggagcagcagctaatggccaagtcaggtgagctgctggccctgcagaaagaggctgacgatatgagggccgacttcagcctcctgaggaaccagttcttaacagaaaggaagaaggcagagaagcaggtggccgggctaaaggaagcactgaagatccagcgcagtcagctggagaaaaacctcctggtgagtgtttgctgccctgggagtgtagggaaatcaatacgtttacccgacttgacacatgcatttttcttatacacagcttcattatgaagaaaataaatcatccatcaacccaggccctaccccagtggttattattggtgtattttgtcataattgattgttgaagcacacagtgagtcttggctgccagcagccatcctgtggacagcacagcacagtagggagctctgccctctgctcagcccactgcaggctctaggcattgggttggtaggcacctttgcagagcctcaggcagcctgtttgtggcaatctgccctttttgttcagcattaatttttatcaagcgttaaaaccaggaagcctggtctaccatgcttttacccatgacctaaggggtggggtggtgatgacatcagtcagagcagtgtgcacagtgtttccaggagtggctgtttccagcgctctctggagggactagtagaactgctgtatgaaggaaatctgatgcgttatcagaaggtggtgtgctttaactaggacttgggcaggatgatcggaaagatagatttaagctggccatggtggcccagtcctctaatcccagactcaaaaccagaggctggaggatctctgtgagttcgaggccagcctggtcttacagtgagttccaggccaaccagagctacacagtgagaccctgtctcaaatcaataaatgataatccctacagcccctgaaggatgttgccctttcatgggtcactgatggggctgagggaggggaaggtgacttgtcagaggtactgctaaagatttggcttcaaacactggattcaaattctcccagtcacactacacctgcctccagaatgctccatttcacagttgtagaaactgaggtctttacattgctggtgagtgtggaacccgtgtgtgtctgcaaagtcctttgcctccctgcatgctaggagcagaagcaggagaacagctgcatgcaaaaggaaatggctacaattgagctggtggcccaggacaaccacgagagggccaggcgcctcatgaaggagctgagccagatgcagcaggagtacctggaactcaagaaacaggtgtgcaccccagaaccccagctgaccagcccgggccactgtgcgggcacaggcagggtttattgttgtcagtatctctttaacaggaatgtgggacttgtgaaagctgactgtaaagagtgttcttcaagttaatttttttcttagccttaaaatttagacataaacttaaggaaaaagaattggttgaaaatctactcttaaaattaaatgaactagcttttttttaaaaaagatttatttatttttattatatgtaagtacactgtagctgtcttcagacactccagaagagggagtcagatttcattacggatggttgtgagctagcatgtggttgctgggatttgaacttcggaccttcgaaagagtagtcgggtgctcttacccactgagccatctcaccagcccatgaactagcgttttaaagtgatcttatttatttacagatttatggttatgtgtgaatgtgtacgtgtgtgcgcccacaccgtggtgagcatgaggaggtcagaagacaacttgtgggaggccgttctgctcgtgaactgggctctgaggattcagttcggtgtgaggcttattaacaagtgccttacctgctaagccagctcagctgactggctttaagtgggtgtgcaggcccaggacctgagtgtgctggtggatatgtgtgtgggagtgggaggagccttggctctcattctcaggaatgccagcatgtgtttagatggactggcctgcagtgagcccccatgcccagcacggttatgtgtgttctggggcttgagctcaggtcttcatgcttgcaagtttactggctgactttttgtgttgtgtgtgtgcatgcgcacccatgcccttgtctgtagcaatatacatctgtacacatacatgtggagggcaaagatcacacgcaggcgccattcctcagatgtccaccttgctttttgacaagattcccatcttagagtttctgttgctatgctaaaagaccatgaccaaaagcaccttgggaaggaaggggttaatttcagctcgcagccctcaggccacacttcatcaggacaggaagtgaagcatgccttggaggaacttggaggaactctgcttactggcaggaagctgcttactagcgttcttctcatggcctgctcagactgctttcttgtacaactcgggaccatcagcctaggagtggccccgccacagtctgtgggaccccctcctccccacacacacatcagtcagcagtcatgaaaccgcctgatgcactcacctataggccagtcttagggaggcatcttctcaattgagaggcccttttcccaaatgactatagcttgtgttaagctgacataaaactaactaactcactagctctcactgggacctgaggcttaccaattaggatatgccccatccacgaacctgtctttatgccctagcacggaggtacaggcacatgccactatactagcttttatgggaaagctggaaatccaactctagtcctcgtgcccagcaagcactgcactaatggaaccttctccccagctgtttctgttgattgtttgctgtgagtgtgggtgttgcatgcacttaaatggttcatgtagagagccagggaagagcactcgatatcttcctctaattgttctactgccttgcgacagggactctcactgaaacttaagctcactgctaggctaggctggctggccagtgagccccaaagactgacctgcctctacctccctagtcctggaatgacaagcatggtccctcacccagccttgtgggttctgaggattgaactcgggtcctgatgcttgcaaatcaagaactgcgtgtactaactgagcctgtccagggtgtgtgatcttccaggtaagacgcactaagcgactcagttctaagtcctgatgtttgaccccaccaccctgcttaggtagcaaaccagaaagacttggagaggaggcagatggaggtcagtgacgcaatgaggacgctgaagtcggaggtgaaagacgaaatcagaaccagtctgaggaacctcaaccagttccttccagaacttccagcagatctagcgtctattttggaaagaaatgaaaacttaagagagttggaaagcttgaaagagaacttcccgtttaccacaaaagagaggatttttgaagaaaaatccaactttccccaagttcacatcatggtaacgtttgtccagctgtcccgggcttcagagtgagaatctgattcccgcctcccccgagaaagctaaaaacagatttgggagcaccagggagggagggaaagatggttggctcccacctgtggcagtcggtgactcattggtctccttttctctctgaaaaaggatgaacactggcgtggagaagcactccgtcaaaggctgcgccgccatgaagatcaactcaaggttgcctcttaaaaaaccagagaaagtccctgtgagataattggcacttggcaagagtagggaaagatttccatgtgcagtctactgcaacactcaggaggatgcttatagatcacacttaagacgttcagagaagctgacattacagatagcaaatggctatcagcattcaagcccatctgaattctagggcattggaggatagcccagtggtacagcacttgtctagcacatgcaaggcactgggtccaatctagaatcttggtgtcaagctgtgttctttaacctctataacgctgttccttgagacagggtctctctgtaccctagaatatcctagtactacagggtagccctgaatttggggctgtctggcctgtttccccagtgcaaggattggtgattactgccatgccctaccctcatatctgtttattaaagttagcttgtttatcaaatgtgaagaagcagagtacattcaggagcatttcttccatgtaaaccccacatctgataacactttccaggctcaacttcgacactgtatgtctaagcaagcagaagtattgatcaaaggaaagcagcagacagagggcaccctacacagtctgaggagacaagttgatgctttaggagaactggtcactagtacctccacagactcagcatcatcacccagtctgccttcccttgtggaggactcccagcatgggcatagtcaggtaagaggaagctctctagagttacttggaaacttcggggtaggtggtccagaaagactgaaatgccaccctcaactgtcttagcaaagactatttgtctgccatcgctggggaaagcttataggtgcagaaagaataggcaagctgtagcttagacggtgaattggaattggagctaggatgactcaggagagatttagtgtgtgtcctcaacttctggatttattttcagtatagagggttggagagatggttcagcagttaagagcactgaagctttacccagactaagttcctagcactcatctggcagctctcacattcatgtgtttgatttcaaaggacccgtcacccttttctccacaagcaccaggcaccccaacagtgcagacatatacatgcaggcaaaacagccatatacatttagaaggagtaagagcttaggcctgtgaggttaaatgtgggtttccctgggttttaggtggtacctctcatgtctcaaagacatttgaatgcagacttcacttcctatttataaaactctggacatcacaaaggtttctgtgtgggacttagttatcagtcatctaatagaaaaaaaaataactcgtggaactgaccaacagtaacacattgtgagcagaaaatggcttccattttcaggtgcttactctatgtacatactaaaaaccatacatacaacaccccatttagaaaggtacaaattgtccctttgtgtaggtaaggaactacatgaagttgtaagtaacaggtcaagggtatagcaaaggacagacagatcaggatacagaagccaacctacctttaccaagaagcagcggatcctgagtatactgtaaatcacaaggactagccaaggacagttttgtagtgagaattttagtttctttaaatacagaaatgttacatgaatatggttttgttttgatctcaggtatgggatacggagctgctctcatgcttttgtggggggtgtgattttgccagctgccagtagtttccacaagtgtatgatgtttggaattctggggactcttgaaagggtatataagtgctagagccccgaagggcatcgctcccgctggttagccagttggtagttagttgttggttaagtggtcaagtgtagaaaatcatgagatatcctgactgcaaagatcaaacttgccccagggaactcaacatccctaaacagcagaaagtagtctaataatatccaccgcctcccctcccctcccctctagtctttctctcctgcctagtgttgggagattgaaagggtggaagaagaggagtgggaaaaggtggtagaaaaaggaactcagcctacagccaagtttcgatggatacacagttgtttctttgactggcctgaggggcagatagctaacctgagacacaaacctaatgagcagcggggctaagattttaatatggttatcttaccacctgtggttgagacaagtcaggtaaaggcccagaccatatggccctccagagcttagactgtaaggcaatagcacagggcccatacatgagccttgggggtactctacaagatatcagaggcataggtgaattgtaggcagtgttttagtctgtggttgtcatctgagccacagtggcatgaagccttaaatagggttgggattgggggctggattctgtgcctaaaatgagttcccttcttttcagagctccttccaagttctgcaagttccattagaagaaccaaacagttaccgccactaagtttcctgcttgcaggtacgttagccaaccagcacttaattaaaacatggaattctggcagccccaggaaaactaacctcatctttcatcattttatagcagttcatcttaaagcatttgggggctggagctatctatggcttgatggtagagcacttgcctagcacatgtacgtccccagattcaatccccagcaggtccttaagcacattattttgccagtcatcacaccaccaccacatcctgtaaggccttgtctggttagaggtttaactcatccgttctgcttgtcttactgtaggaaaagaagctccagccaaggtcaggaatacagccatgtgtaaccataagaggaaatagctactctcctacctcactgacatcctaatggaatgtcaatcaagatcctgtgaagactgaaaatgcattgtagtttgtaccatttataccgaggtgtctgtaaatcacatgcacttgtgggactagatgtgtgtatctaacataggatgtaaggggctatttttgactctcctcctcctccaatgatgaaatattttttaaagacagtgaaaccacatatactgagtccataactggtatgtctagttaccatggaaaagaatgtactaaaagcccctaggcttaattaataagttattatttttgattctgatccaaagtttatttttaatatgaaaataaaggtacagtcaacttgtgtctgtcatccgcaggttacctttattctaagacaataacaatatcccagtcatttcctaccactttttacctggtctacttagcagcaagtgcttcatcagaagtacctattaagaattcatcacatgtaggctgcttttccttattaaaatagtaattcttggtggaaaacatcaagactatactgtggagactcagttctgatggtgagtatattacagacaacctttaagcattcaactctgtgactgatccatttagttaaaagcaagagtaactgtctgatgatgttgactatgttgactagacagccttttgagccaccatcagcattgtagcatgtcagctcagcgcagcccagcatccctcactaagctatctggctagttacagaatacgtataattacaagagacaatagaagtcacactgcttactgcacattatctagatgacctgtatttccaacacaaaacttgtcttttgtattcatatacttttactttatgtctttgcaaaatgcttaaaggtatggactaatcccaactattgacacagtacaggaataggacctaatgaaggtgaagtagtcttattcccacataaatcttcatctctactaccacataaatagtaatagaaattgcctggtctttttttctgtttatgatgagggaactacaccatctatttaaggccacatttaaagcagttctcaaaactgagctttcaaaacacctgatttcaaaacctacagccgggggctgcttgcttagtttgtgcagaatcctgggtctgaccaaccacacacaccaacacaaccagaggacatcttaaaaaaaccttgtatagccttactagtaccatgtgaccaccaccacccaactccttccagccatcatttcattgaacacgttattacttcaaaaacaaaacaaaacaccaaaaatcaactccacattgtgttggagtactagttaccaccagaggggttcctccacagcaaaagcagagtgagaaagccagaggaggcatctgcacaatgacaagcttttgtgggttaaaaatgaacagaaatccactctgcccagatccactggctcacagatgctgcactatgacaatctgcttatctttaagctcccaaatttattacacgctggttacacaaacaaatagaatttggccccatatacagaaaagggagaacactattagctagcaatgtgctggcctcaaagatgcaacatacatggatgaaactccagctcaattggtagctttactgctactcagacctcaccatacactaagtgcaatgctgtagtaaaaactgatagttcaaatattcatctgaaaagtcttacagatcaaaaataatgcaactatgttcaatttaatctagatacaggtactttatttacaaatatttagataatagcattttgttacatcaaatgaagagtacagcagtctgaataaatccttctgtcacaaaaacaattaggacccactgtcactttgggaaatggggtattgcacctaaacaagccgaaggtcttcactctgtgattgctaccttatgtcccgatgggtgatttgttttgttttgtaaatatatacacacaccagcaggtcatggtccctgggcgaatcccctgtgatgcaacagtgtaagcaaatggatcactctacatctttaacagaatagatcagtctactccaagattcctttaagttaaacaaggacaaaaaggtgaatccacaagaaaaccgaatcctattttctgcacattccagttttggcttttatttaacattgactatacaaaactctggaactaccacatgtttataatccagaagatgtacttttacattagtgtctggtaaagagggatttaaaatgtgtattttaacacagcaatgagcagagagcattttatataatgtgctggggcttacctacgtgcacttccaatgacctctcaattcccagccactttaaactcagctagaaaccaaccaagagaagggaagaactgagtgaagcagatgctgcctagagatctgtttctcttgcaaggcgttctttccgtggccagaccacccagtgcaaagtagcaacttacatgatgtcagcatacacatttagaaacaccttcccttttacaaaataatttatgccaacatgacataagatagcccctcatactatgaacacaaaggataatactaaattatctcactgtagtgttaaaaacgcacaatttaaaatcccttaacagcagacctgtggttctggctatctggtccagaagttgaccattccaagataaaggtataaaagcttaaaatgtgcaatattaaacccagccttcttccttttcctatacagtaaggcaagaatgcagcctataacacaaaatgtttacaaaaagaaaagcaggtgagcgcgttgattacacaagaacagttaagaaaatcagcaggtatgccacagtgcaaagatggagtagaatccgctagtgtttccgctgatgccaggagctctttccagcattatgtctgtccccaaacactgccagcaccaaggagtggagccagtattacttgtgagctgctgttgtgtcttatttccgtgtgtgaaatggaagagtaacatggtcacatataggtcacactgtacaaactggtattttatactgttccaatgccagtaatcaatttattttcttcattaaaataatatacacagaaggtattgttagttaggttccttcaaattttatacatatttactttctgttaaagagaaaaggataaaatagtgtaaaaattaaaaaaaaaagataaagctattaattaagcacaagaaaagataaatgggtatttttccctgtgcaaggctaagacagaagcaaacctcatcaagaaaaatgccacccctacaacagggaatttatccaacaaaaacaaaagcagttgcagaccccttttctctaccatccaaagtcatttcacagcaatgaacttactggctacaacagacatactcaacagtttaaagatgggaggaaggctgaaaagatcaaatttaaaccgtacagcgagacaaagccttgccaaaagggaaggtaaaaatcaggtccagcagcagtgctcagtttaaatcatatattggtgacaaacctatcacaaggacaatcaaagggggaaagtctagatttaccatgcaggagagatttattactctacttgcctttgataacctgattacatctagatgtttagcagtttagtattgttaaactgtttttacaagagttgttttttcttttttctttttttaattaaacccagtaagatgtacagaagacaaggaggcagtaaaaagtactgcttccaacagacagaggtgaaaggtcaaatgaggggccagagcaaagaggtcactagcagccacagccttctctctggggttggggttcactggttagccgtcctccctgcggggctgagggtttgtgttgtacaccagactcggcagcattcagatccaggcttccatcctgaatgttctgatagattttcttggcagcctcaagaaaagcatcttctacattctctcccctaagagacaatcaacaactttatttacaaagcacagctttctagaaaatgtaaggcatttacactgacctgctaaacctttagtcaactgccatgatgtcttccacttagccactgtcatctaataagagattaccagaagactgagctaagagaacataggaaatgtttttggtggtgagtaaacaacccagtaccaagctgtttctaaagctcagtttgcatatttacatcgtctactcactgcagggctctgttaatatactgcatgaaaactgagacggccactctgaaatgagcaggtgctccaaataaaacttctccaaatgtaccgacaggattccaggctttccattattttatgaacagccatgtataaaactatgctatctttatcatgcaatggtgacatagtcatgtttaaccatgttcacagctcagttctcttgggaccaacagcagagataaataacatgaacaggttggcctgtccttgcctggtgtgatacagaactatgactgggagtgctgggatcaatgctaaactccaaggcaatcaggaaatgttcgctgtgtctcattagtcactaagtatggagtccttgaatcattaaggtgctgtgtgaacatgctggcccagtgcatgttcaagataccaaactcaacctcagctgtgagagtcaaacacttgtgagatgtcagcacagtttcatttattaagctgggttaccagtggacacaatgaggtacaaccctttaagtaaaagggtcccattctcttgtaaagtgaaacaggagcttcttctgctcactgctcttcctgctgtccacggcctcactacacagcacagttcccacgcctgtctacagcatcactcacttacacagcacatgattctactctgcatggaactgaaacatgatctacattttagccatacttacgtttttgcgcttgcttcaaggaacaataagcctaaaaataaaattcagactaaaattaggacattgcagagtcaggagtgctccagtcacatgtgagtaggccccacagctgtcagtactcctactccagccctcatgaaggagcacgtgtctgaggtgcaggggcagatcagtacttgtcactcagtagctgcactactactaacaggtatcatagaaacaaacactttatttccttattgagatttctgaatagaacaagttaaaaaaacaaaattcgaatagccggcatgatctaattctcctttcttttaaaaaatcccataggagagtgttaagtctcaaacccaccgttttcctcagcaaactgtttggcttcttcataggtaacatctctctgtgcttccaagtctgctttatttcctatgagaattattacctaattcgtgaacaaaagaaaagatatcttagaacaaaaatacctatgaaaattctcaaatacaaaagccttgacagaaaaaaagatgagccctggactacacagcataaggcaagaacactgagcagaactttcacaacaagctggctcaggttctgaaaactgactgtaaggaagagaaggcatatttcagatttgtgggccccacacaagtcttgctgaatattatttttattgttgtcacaaatctcttaaaaatagaaaagtcattcattaggtgaatatggctcacaagccaatttgttcatatctggtctaggccaaaaaaaaataagcaaaattaataagaaggccctaaaattaagtgcaaagtgctgttaccatgaacactccctggagaaggcttatagctttcagttctcaaaagattctgggaccttgaggaaacttgaaaaccactagtttaattcattcagggtaacagtaattaccttccccttaaattcaagacagagttagcaaagagggcattagaaccttagagaatgcaaactgtgacctaaagacaaactatcccaggagaggtgtaaatttctatcaacttatcagcaatgcgtgtgtctgtgaaagaagctgaggatgggataaatacgcaataggttcaaatcctggaacaaataccacactctgtcatctactttggagttacctactcgagtaaaattgttaaaagactaaaggtagccgtagaaaacaaaggggttttgtttgttatttaaagcacaaagggggaagatatcagcccctcttctacttcctgccccctttaaccagatacagaggttaggaatcaatgatttcaacaaaaaagtgcttcccaactttttttttccatataaaattagtacttgtacttgtctcttccactttcaaatatttgggtccagtgaactaatcaattatttccaagtaagttacatgggtataataacaacaacaataacaacaacagcagcaataataaaatcattcttcaaagtgcaagtgactactgacaagggaaaataatgttcatagtcatttgaacaataaaataatggcacttaacaaaaagatcaaacccattcaaatcaagaaatactatcttcagtatgggcaagcatttgcctagcaggcactcagctatggttttaatctccaacactccactctaccacaactctcttcaaaaagaagtattttctctttcccaactacatatcaatctccaatcttcattgcccacctccctccctcaagaggtagtcttgtaacaaagtggcacaaaacattaacaaaaatgaagaatacatactttccccataaaaacaaaaggcaatttcataggaaacatagtaatataaataaagtgtgcttcaaaaaacattttcaaaattttttagtaactcacagggctacattatactgtcaaaacgagaaactaacactggtacaattactgccctaagataccagtgttttttgtttgtttgtttttcaaaagtgtatgtggctgtacccacatgtggctctgtgcagtgttagaatagactctggctgtcacctcaatctgggcacagaattatcaacatcatcaccaagaaactgctctggctgttttttcccagttctatcaactacctaacctgtcactaaccaacccttggccatcactagtttgttctttatctatctacaatactgtcattttgaaatatgtcaatagaatcatagaatatgtaagccttttagattttttaaactcagcaaaattctcttcagatttatcagctgatgctgttaccctaattgcttcttcagtgtggctgaataccaggtcactgaagtgggaattgcaaccaaactgttgctgttcacatatctgtggtagctggactgatttccgtttttagttatcacaaataaagctgctatgaacatttatccataggtctctatgcatagcaacagccgagtttagtataaatgaaaatgaaagctctaggctctacactagcaaaacagatctcttaccaagtgcaggaggtacaaagctaagtgaaacactgttcttgcaacaccctccaggataccagaaggccctgctcgactgtgctctccaccactgaaccattcacatttctaattcatcattcaggtggttttatggcttctcagtaaacctgaaggttctctctgctagacaataacccactgaggaccagaaacatgtttatctttgcatactgtgaaatctagcatggtagctgtccttcaatagctcagtatcttttctgtcttgctaagaagttaattacttaaagtatatagaatacttacttttagttgacattttattgagataattacaaattcacatgcaactgtaaaaaaccaaaaagagcccttgcacagttttgcccagtttcctctaatggtaatattttacaaacttaatctagaagtgttttaaatttataatttcagattataataactccaactgatagcaccacctcattcatagctttttgtttttgttttcaaatccaaacataaaaagtataataaaaatacttggggctggggatgtagcttcatggcagatcatctgcctcgcataaatgaggcctgcatctctagcattaaagaaaatctgaatgcaatgaataaatgagtgagtgagagaatgagggaatggtctcttaatcttagcacccaaataacaatatctcaccagtacaaggccagcctgtttgggttagctgattttaaatctctatacagttaagtgttgacttacagtgtttggattggtgagattccttgcgtctgtcaaccagctgcttaagtggttatatgtacttcttctgcaaaagttaaaattaaaatgtgttgattctacatacgattgccatttgttcagaacaacaacaacaaagaaccaggtgtgatgtgccttacacatgtaatcccagcaagccaaaggcacgagagccctgaatttgagccaccatggcactaagtgaattccttataccatggcttgtacaacagtctcaaaaacaaacaagcaaataaacatataagtctgtacataatacatatacagaatttaattgaaagacccaaactatgtgtatttttactttgatgagatggctactccaaagaacagctgtaaacacaaccaacataattctcaagactctagccaaactttgttttgtgttttgaaaagtctccctctgtagttcaagccatcttccctctcttaatgtagccaactttctctcaatcctcccatgtctttgattacaggtgtgccaccatacctggccacaaacccattatttttttttaattaggtattttctctatttacatttcaaatgttttcctctttctaggtctcccctttggaaaaccccctatcccatttcccctccccctacctcttcaagggtgctcccccacccacccactcccaaactcattaattttaaatagctcaatatccaactatattaataatatcagaagtatatatataaacacaccaatgtgcaagcaaggtacatagaatattcagaaccaagatttgcagtttagagtcaaaactaacattccttgaaattatccatattttctaatcacaaattggataacagtaccaaaatgtttaccaagcaaaattcccaaaggaaaaaatatttttgcttctaccttcaagttacgatttttagtcagaaataaaagacagacatattaaattagtacataattcatctttcctaaattgttcttttagtttcttttttctttttccttttttgaatgtttcccaggcccaccaacttgtgaccatcttcctaaatgctagaattccaggcatatgacaccatgcccagattactactctggactgagttaatacacagattaaaaactgcctttaaaaaaggcatttaatgagttcatctaaaaattcaagacctcagctaccggaaagaaagcttgtatcttgtcactcttatctgcatggcacttaaagccgctagagattcagactatggcactgttctattccacatggtgtcatctgcactagtccagttgaccctaacacaacaaatcaatccacgcacagacggtctctgggttaggatggctcagctttctactcttgacttcacgatatattctgactgtctggcaaaacaactgacataataagcttcattatcaatttaggaaaatggcttgtaacaattatagctgatgccgaagataaaaagcattattaaagcaggaacttctaagctgtaaaatgttaaggatttacagaaataagtggtagaaaatagtgtcatttctctaccagcaacctgtgactatgaactgtctaaagtcatctaacatccaaagtacttctttcagtaaatactgaaataaaacgcatcaccataaaccctttaaaaatacaatttacttttagtatcactactaaattctagaacattcacaggatccccaaaagagaaattttgtgcccagtaactgccatgtccttgtaatcttcctgcctattctagataaatagagtcacaagtggcctttacacttacatatagcatttatcagtcatcctttttatagctcaaaaacagttcattgtgtggatagccacctgatgtatattcattcctttagctgatggacatttctgctgtttccatatgaagtgcttgcatacacttgaatacacataaatttcaccacagtattactatacttaaaagatatgtttaaaaagcaaaataaattgcattttaagcacacatcatatttaagtgtattggtaatgtatgggacatttaattacattaagtcttcaggaatgcaataaaaactcatattgaggcagttctgtacaacagcca

SEQ ID NO: 1223 - DNA, 6822 bp, Mus musculus
ccctctcggcaaccggcacaacacaacaaaatggctgctgtgctgtcggtctcctgaggggaagtatcccggcgtctccgcctcgcccctcccgctaggccgttccttcccgtgctgaggcggttttgatggccacctggttttattcttgcaatgaagaaaggttctgaacgaaggctctccaaagcaaagatgccgctgtcatctcattttcctgggccatcatctcttaggtccagcatgcgatctaggtccctttcacctttaattggatctgagactcagcctttacatcctggcggacagtggcctgcacaggctgagctgacagatgaaagcactgtgcctttggagccccagcaacgtaaaggagctgagtcatatgtaggagtccggtatattacagaagccctcatcaaaaaactcactaaacaggacaatttggccttggtgaagtctctgaatctttcactttctaaagatggcggcaagaaatttaggtacatcgaaaatttggaaaagtgtgttaaacttgaagtactaaatctcagctataatctaatagtgaagatagagaaagtggacaagctgttacgattacgtgaactcaacttatcatataacaaaatcagcaaaattgaaggactagaaaacatgtgtaacctgcagaagctaaacctagcaggtaatgaaatcgagcatattccagtgtggttcgcaaagaaattgaaatctttacgagtcctcaatctgaaaggcaataagatatcatcgctccaggatgtaagcaagttgaagccacttcaagatttgacttctttagtcctcattgacaatccagttgtggcccttccgcattacctccagttcatcattttccacctccgttccctggaaagtttggaaggtcagccagtaaccactcaggatagacaagaggctttcgagagattcagcttggaggagatagaaagactggaaaaagacctggagaagaagacagtggaaacagaagagcttaagaacaagcaaacaaagtttctcgaggaaataaagaatcaggataaactaaacaagtcattaaaagaagaagccatgttacaaaaacagagctgtgaggagctagaaagtgacctcagcacaaagaaggagttgctaaaacagaaaacagtggaactaacacgggcatgtcagaagcagtatgagctggagcaggaactggccttttataaaattgatgccaagtttgagccattaaattattatccatcagagtatgctgaaattgacaaatacccagatgaaagcccttacattggcaaatccagatacaagagaaatatgtttgccacggagacttacattgtcagcgacgcccaggcagttcagatcaggaagatggtgccagaaggaggacagcttagacacgagcacacacccccgagagtccaagcaccacctgatctacagttggaagatacggaaaaaaaaataagtgcagcacaaactcgactgtcagaactacaccatgaaatagaaacagcagaacaaaaagtattacgggctactcaagaatttaaacaactggaagaagctatacaacaaaaaaagatttcagaagcagagaaagacctccttctcaagcagttgagtggtagactacaacatctaaacagattacgccaggaagctctggacctagaaatacagatggaaaagcaaagaaaagaaattgccgaaaagcatgaagagatcaataccgtgcagctagccacagacagcctggatcccaaagacccaaaacattcccacatgaaagcccagaagaggggcaaagaacagcagcttgacattatgaacagacagtacacacagctcgaaagccgcctggacgagatactttgtagaattgccaaagagactgaagagatcaaggaccttgaacagcagcttacagatggccagatagcagcaaacgaagctctgaagaaggatttagaaggtgtcatcagtgggttgcaagagtaccttggaaccatcaaaggccaggcaactcaggcccagaatgagtgcaggaagctacaggatgagaaagagacattgctgcagagactgacagaagtccagcaggagaaggaggaacttgaactcattgccatggatgcagaaaatatgaggaaggagcttgcagagctagaaagtgccctccaggaacagcatgaggtgaatgcatccctacagcaagcccagggagatctcagcgcctatgaaactgagctagagactcagttaaaactaaaagacgctgaaaccagccagctcaagcaagagttggaaaaactcctaaggcgtactcagttagagcaatcggtgcttcaaacagaactggagaaggagagagaatccctcagggatgccctgggcaaagcccagtcctcagaagagaaacaacaggagaacaacgagctccgtacacagctgaagcagctgcaggatgacaacagcctgttaaagaagcagctgaaagagtttcagaatcaccttaaccatgtggttgatggtctgattcacccagaggaagtagcagctcgtgtagacgagctaaggaaaaggttgaaactaggagctggggaaatgagaatccatagtccttcagatgtcttagggaaaagtcttgctgacctacagaaacagttcagtgaaatccttgcacgatcccagtgggaaaaagaggaagcccaagttagagagaggaagctccatgaagaaatggctctccagcaagagaaactggcgaatggtcaagaggagttcaggcaggcctgcgaaagagcacttgaagccagaattaagtttgataaaagacaacataatgcaagaatccagcaattagaaaatgaaattcactatttgcaagagaacctaaaaagtatggaaaaaatccaaggccttacagaccttcagcttcaggaagcagatgaagagaaggaaagaattctggcccaactccaggagttagagaaaaagaagaagcgtgaagatgccagatctcaggaacagtttcttggtttagatgaagaactgaagagtctgaagaaagcggtggctgcttctgataaattagctgcggctgagctcaccattgccaaagaccagctcaagtccctgcacggaactgttgtgagaattaatcaggagcgagcagaggagctgcaggaggcagagaggttcagcagagaggccatgcaagcagccaaggacctgagcagagcggaggcagagatcgagctcctgcagcaccttctcagggagagagagggccagttccgagatgagatggaaaatgcagatttaggtgctaaaggagcaaactcccagctgctagagattgaggcgctgaacgaggccatggcgaagcaaagagctgagatcacgagactccgggatgtattaaacctcacgggggcaggtacaaaaggaggcattgagaacgtgttagaggaaatcgctgagctccggcatgcagtctctgctcagaacgagtacatcagcagcatggcagatcctttcagaagacaaggctggtggtactttatgccaccagcaccatcctcaaaagtttccagccatagttctcaggccaccaaggactccggtttgggtctaaagtacacagcctcaactcctcttagaaaaccacagcctggacagcaagaagaaaaggacagcagtggacctctgcctgcttcagggtactgggtctactcccccatcagaagcacgctgcataagtcattttcaaagagagaagatgcagacagtggaggagatagccaggaagaaagtggactggatgaccaggaggaacccccatttgtgcctccccctgggtacataatgtatactgtacttcctgatggttctcctgtaccccagggagtggccctgtatgcaccatcgcctccattgcccaacagcagccatcctctgacccccggcactgtggtttatgggccacctcctgctggggcccccatcatatacggacctcctcctgccaacttcgctgttccccttgtccccgcgggtgtgcagcattgcaacatcccagagcaccataacctagagaatgaagtgtctagactagaagacataatgcagcacttaaaatcaaaacagcgggaagagcggcggcagaaagcatccacgcagcattctgaggaagaagtggatgggctgcaccgtgatattgatgaccttttgcaagagaagaaagaattagaacttgaagtagaagaattacatagaactattgagagacatcaacaacgaaaggacttcattgatggacatgttgagaatcttatgactgaactagaaatagaaaagtctctcaaacatcatgaggatatcgtagatgaaattgagtgcctagagaaaactctcctgaaacgtcgctcggaactcagggaagctgaccgacttctggcggaagccgagaatgagcttgcatgcaccaaggagaagacaaagagtgctgttgaaaaattcactgatgccaagagaaatttattacaaaccgagtcagacgctgaggcactagaaaagagagcccaggagactgcacttaaccttgtgaaagcagagcagcagctaagactgctccaggctgatgcagaggacttggagcagcacaaaatcaaacaagaagaaatcttgaaagaaataaacaaagttgtagcagccaaagatgccgatttccagtgtctaaacgagaagaaggaaaaactgacagaagagcttcagagtctgcagagagacatcaaggcagcgcaacacagtgaggatcaccaccttcaggtccttagagagtctgagactctccttcaggccaagagagctgagctggaaacactgaaaagccaggtgacaagccagcagcaggagttggctgtcctggactcagagttggggcatagaagggaggagctgcttctactccaggacagcctcgcccaggcaaaagctgacctccaggaagccctgacactgggggagacggaagttgctgagaagtgcagtcacattagggaagtaaaatcacttctggaagaactaagttttcagaaaggagaactgaatgtccacatcagtgaaaagaagactcagctcgcacttatacagcaggagatggagaaagaggaaaagaatcttcaggtggttttacagcagctgtcgagacataagactgaactaaagaatgttgcagacatactgcagcttgaaaccagcgagctccaaggtctgaagctccagcatgaccagaaggtggtggagctggagaaggcgcaggtggacgtgctggaggagaaactagagctggagaatttgcagcaggcaacgcagcagcagagaagggagctagagcggcagagacagctcctggagagagacaggcgggagacagagcgagtgagggcagagagccaggccctgcagtcctgcgtcgaatgtctgagtaaagaaaaggaggatctccaaggacagtgcgagagctgggaaaagaagtcttcccacgcccaaagagttctagcagccacagaagaaagcaacaaaatggagcagtccaaccttgggaagttggaactgagtgtcagaaagctgcggcaggagctggagcagctgagccaagacaagcttgccctacacagtgaggtagccgaggtgcagcagcagctttcagaacgggagcagcagctaatggccaagtcaggtgagctgctggccctgcagaaagaggctgacgatatgagggccgacttcagcctcctgaggaaccagttcttaacagaaaggaagaaggcagagaagcaggtggccgggctaaaggaagcactgaagatccagcgcagtcagctggagaaaaacctcctggagcagaagcaggagaacagctgcatgcaaaaggaaatggctacaattgagctggtggcccaggacaaccacgagagggccaggcgcctcatgaaggagctgagccagatgcagcaggagtacctggaactcaagaaacaggatgaacactggcgtggagaagcactccgtcaaaggctgcgccgccatgaagatcaactcaaggctcaacttcgacactgtatgtctaagcaagcagaagtattgatcaaaggaaagcagcagacagagggcaccctacacagtctgaggagacaagttgatgctttaggagaactggtcactagtacctccacagactcagcatcatcacccagtctgccttcccttgtggaggactcccagcatgggcatagtcagagctccttccaagttctgcaagttccattagaagaaccaaacagttaccgccactaagtttcctgcttgcaggaaaagaagctccagccaaggtcaggaatacagccatgtgtaaccataagaggaaatagctactctcctacctcactgacatcctaatggaatgtcaatcaagatcctgtgaagactgaaaatgcattgtagtttgtaccatttataccgaggtgtctgtaaatcacatgcacttgtgggactagatgtgtgtatctaacataggatgtaaggggctatttttgactctcctcctcctccaatgatgaaatattttttaaagacagtgaaaccacatatactgagtccataactggtatgtctagttaccatggaaaagaatgtactaaaagcccctaggcttaattaataagttattatttttgattctgatccaaagtttatttttaatatgaaaataaaggtacagtcaacttg

SEQ ID NO: 1224 - protein, 2068 aa, Mus musculus
MKKGSRLSKAKMPLSSHFPGPSSLRSSMRSRSLSPLIGSETQPLHPGGQWPAQAELTDESTVPLEPQQRKGAESYVGVRYITEALIKKLTKQDNLALVKSLNLSLSKDGGKKFRYIENLEKCVKLEVLNLSYNLIVKIEKVDKLLRLRELNLSYNKISKIEGLENMCNLQKLNLAGNEIEHIPVWFAKKLKSLRVLNLKGNKISSLQDVSKLKPLQDLTSLVLIDNPVVPHYLQFIIFHLRSLESLEGQPVTTQDRQEAFERFSLEEIERLEKDLEKKTVETEELKNKQTKFLEEIKNQDKLNKSLKEEAMLQKQSCEELESDLSTKKELLKQKTVELTRACQKQYELEQELAFYKIDAKFEPLNYYPSEYAEIDKYPDESPYIGKSRYKRNMFATETYIVSDAQAVQIRKMVPEGGQLRHEHTPPRVQAPPDLQLEDTEKKISAAQTRLSELHHEIETAEQKVLRATQEFKQLEEAIQQKKISEAEKDLLLKQLSGRLQHLNRLRQEALDLEIQMEKQRKEIAEKHEEINTVQLATDSLDPKDPKHSHMKAQKRGKEQQLDIMNRQYTQLESRLDEILCRIAKETEEIKDLEQQLTDGQIAANEALKKDLEGVISGLQEYLGTIKGQATQAQNECRKLQDEKETLLQRLTEVQQEKEELELIAMDAENMRKELAELESALQEQHEVNASLQQAQGDLSAYETELETQLKLKDAETSQLKQELEKLLRRTQLEQSVLQTELEKERESLRDALGKAQSSEEKQQENNELRTQLKQLQDDNSLLKKQLKEFQNHLNHVVDGLIHPEEVAARVDELRKRLKLGAGEMRIHSPSDVLGKSLADLQKQFSEILARSQWEKEEAQVRERKLHEEMALQQEKLANGQEEFRQACERALEARIKFDKRQHNARIQQLENEIHYLQENLKSMEKIQGLTDLQLQEADEEKERILAQLQELEKKKKREDARSQEQFLGLDEELKSLKKAVAASDKLAAAELTIAKDQLKSLHGTVVRINQERAEELQEAERFSREAMQAAKDLSRAEAEIELLQHLLREREGQFRDEMENADLGAKGANSQLLEIEALNEAMAKQRAEITRLRDVLNLTGAGTKGGIENVLEEIAELRHAVSAQNEYISSMADPFRRQGWWYFMPPAPSSKVSSHSSQATKDSGLGLKYTASTPLRKPQPGQQEEKDSSGPLPASGYWVYSPIRSTLHKSFSKREDADSGGDSQEESGLDDQEEPPFVPPPGYIMYTVLPDGSPVPQGVYAPSPPLPNSSHPLTPGTVVYGPPPAGAPIIYGPPPANFAVPLVPAGVQHCNIPEHHNLENEVSRLEDIMQHLKSKQREERRQKASTQHSEEEVDGLHRDIDDLLQEKKELELEVEELHRTIERHQQRKDFIDGHVENLMTELEIEKSLKHHEDIVDEIECLEKTLLKRRSELREADRLLAEAENELACTKEKTKSAVEKFTDAKRNLLQTESDAEALEKRAQETALNLVKAEQQLRLLQADAEDLEQHKIKQEEILKEINKVVAAKDADFQCLNEKKEKLTEELQSLQRDIKAAQHSEDHHLQVLRESETLLQAKRAELETLKSQVTSQQQELAVLDSELGHRREELLLLQDSLAQAKADLQEALTLGETEVAEKCSHIREVKSLLEELSFQKGELNVHEKKTQLALIQQEMEKEEKNLQVVLQQLSRHKTELKNVADILQLETSELQGLKLQHDQKVVELEKAQVDVLEEKLELENLQQATQQQRRELERQRQLLERDRRETERVRAESQALQSCVECLSKEKEDLQGQCESWEKKSSHAQRVLAATEESNKMEQSNLGKLELSVRKLRQELEQLSQDKLALHSEVAEVQQQLSEQQLMAKSGELLALQKEADDMRADFSLLRNQFLTERKKAEKQVAGLKEALKIQRSQLEKNLLEQKQENSCMQKEMATIELVAQDNHERARRLMKELSQMQQEYLELKKQDEHWRGEALRQRLRRHEDQLKAQLRHCMSKQAEVLIKGKQQTEGTLHSLRRQVDALGELVTSTSTDSASSPSLPSLVEDSQHGHSQSSFQVLQVPLEEPNSYRH

SEQ ID NO: 1225 - DNA, 79655 bp, Homo sapiens
ctagttttctcttttgcttatttataatgttattgatatgtttgtgctgtcaataaatgttttgtaaactgtcagaagtttttgctttttttttctatacctatttttgttagaagtcagactgtgctcttctctatgtcattatgttatttttatcattaaccatttaaaaacatgtttatgccaggcgccatcgctcatgcctttaatcccaacactttgggatgctgaggtgcaaggatcacttgaggtcagaaattcaacatcagcctgggcaacataatgagaccctgtctctacaaaaataaaaataaaataaaaacacatttatatacaaaattaatgtatgttcattgtaacaaatttagacaacacaactgtatttagcagaaatgaaagtccactcttccctaccccattccccagatattaatactttgttttccatgcttcttatacagtatacatgtaattacataatgtatatataattaagcatgttatacctttgaatatttttgtaatgaaaaaaggaatgttactgtatacagttattcctctgtatctgtgggggattggttccaggacacccccatggataccaaaatccatggatgctcaagtcctttatgtaaaatggtgtagtatttgcaagtgactttcgtacatcctctagtatactttaaaatcattgctagattacttataatacctaagacattgtcaatgctagtaaatattatattgtttaggaaataataattaagaaaaaatatctgtacatgttcaatacagatgcaaccatccttttaaaaaaatatttttaatccgtggttggttgaatccacagatgcagaactcagatatggagagtagactgtatattattattcagcatcttaactttcacaaaacagcatacgtggacaactctccaagttaaaaaatatatgtacatgcatgtataaagccttcttactctttttaaagtctatgttgtgttccattaaatgtattcttcataatttagttagcctattcctattgatggatatttaggttgctttcacaatttttgctattagagacagtactacagagaaaatctgtgtgtgtgtgtgtgtgtctatatataccttatgcattcatactagtatttctttagcataaaccactagaagtggaattaccgtgtaatttgcatttaaaattttgataagtgttaatgtacacttcaaaaagcttctaaccaatttatatttcagaagggaagaaaatacccaatttccaactaggtactattattttgaatttgtacatatggtagaaaaaaatggaatcttgttttaattttgaatttttatagttgttggacagttgagtattgcatatatatttattggctatttcgtatttcctctttaaattgccagttcatattggttttgcctattatctgttagtcccaaggactattagatgcctaaaataattctgggtcttattctaagagcttatatttgaaaaacatttttattatcttttgcagaatatctaatgataatatcatctgtgattatgtgaagttttccattttaaaaaagtagttgcttgtgcattaggccaattaatgtataaaagaaaagtagcactgaagtaagtcttctggtggccatttaaaccgtagtagtcctgtcctgccaccaacaaatattaaccaaatttactctttgtccttttgcaaattatttaattcctgtgcttcagtttagttatatttaaaatgaggattatttacctgtcctgctagcctcacagaattgtgaggatttaatgagctaataatgaaaataatttgaaatgaatcaagctaagtaatggaaggtagtaaatctataactcagaatgacaataaaatacatccatgtaagaataatgccaatactaaaagccatgtcttcctatggtaagttgtcagtaaagagcaacttgtattattacagtttaactctccaagtgacggtatctgtttgcttcttcttttagcccttgtcttggtttcttgcaggcccttttctgctgattctttattcttccttaaaggtagttcttccaggcctgaactgtgtttttcagggtttgcatgataacttgcattaatatgcttgcttacattttaagttttgaaactggcttgtcttcttgggaaatgtggttgtgtgcgtatgtattatttttttttaatggatgtttatataggagagcaaatttgaatgtgggggaaagaattatttttctgattggtaaatatgttaccttcagtcaactcttgattatccaaagctaatactgtgactagcctactttccagttcatttgacatctattttgcttttattcatgcatttcttcaacagatatttattgagtgcttacaatatgctaagcctggggcttataaaaggcacaaaagtactttgaaatgcacagcctatttattattatttgcctgcagagaccagttcatgtattctctgtgattccagtcacatttgcctgttgtttgccactattgccaatgagttttgaggagagaacccaagattagttgacagtgttgattgtgagttgctttcttgagactcggagacttatgatcattcagtgaaaatatcaatgtgggtaatgtgctggacaccctgcagcagtacatcgaaggcagcatggaagaataggcagtattggatttgaaatcaggagacttggaattgaattctgcctcttccactaccagctgtgaaattgggcaagttatttaacttctctgtgcagcttttatcatcttattgggtggttgtgaagatttagtgcaataacatatgtaaaatgcttagcacaatgtctggcacacattgagtatttggctcaatgttacccattatctaggctattacttccattttgatggataatcaggaggtgactgtgagctaaatcatgcacgactttgatttcctgggccttgtaaaatgtttgtgtttgtttatgttttattctcttcagcttgcacttttatattaatgaaatttttctgcatgttttttctttgatatctaccatcagatactggccaaaaaaagacaaaaatcacttagtggatctttgaaataaactcaaagtttggtttagtagaaaggagctagtactagtagttagttaataaaatatttagtttctgacactgatctaatatgtaactttagacaagtcagttcatcaatctgagacttaatttctgtatttataaattcagagaattagattggatcatttgtcttctccaagctccaaaaatttctaagaataaaaagttatagtagaattactttattaaaattgaatattacatatttggatctggttgagcttattcacatcccttattctttattacaaagaataatattctgaacacttaatactacagcaacaacagtatgacaattaaaaccaagctcttcttttcatccttctcattcctctttatttctctgcagttaatgtcagttatcattttcccttgtaatttgaaactattgttaaagtcggaaagtcagtttaagaaattagtgctaattattggaaaatcaggaagcaggtatttattaggccagttacacaaaaataattgatacaaaaatattttcatgtttaacaaatttaagtgatttttaaaatcattattcattatatcgtgaagcagcagataaacttcaaaggtcttttacatgatctctgatgaaataataattttgtatttcattttttataatttagaagtaagataaaatgttctgagtgttgtgcagcttactgtgaagtttttaaacatatatgattataacttacgatgagaacttaccatatcatcacacctttatactaacttactgatcctgtatgttgtctcatatcaaattgggccaatagctaaaacagaagaccatagaattaacacgagcatgtcagaagcaatatgagctggaacaggaattggccttttataaaattgatgctaaatttgagccactaaattattatccatcagaggtgagttattttaattttttagtaatccaaagttaaagcccacatgggatggaatgggggagggcaggtggtgaggacatgtaagggatttgatcagatatcactccactttcttgttatgagaggattaaactgtattttggttcaatctatgacttatttggctccgggagttagaacagaatcctaaagaggtaaaaaacttcaaaagaatctttgcccatagccatatccattaccaaaagcagtcgtctaactcgcagctatctttcccaggtgtatgggttgatcagctcctttaaatccagacttctgggaaaagtgcttcagtaccatggaatagtcatccccttacatggtttgttcagtaattactgggttcagtattaatcaatcatgactggtacaaatgccataaatgtcactgcaagtgaggaaatgccaaacttctaagacccagtgattccaaccaatatcatatgatatttcatttttaaaaattcaattattaaaatatattatactgatggctacataccatgtatctgaaaaaaatattagactgagattttacttatatgagccaagaaaccaaaataaaacacccatatttctaatttgagagatcaagcagtgctaaaaatcacataactgtaggcagttctttaatcaatcagtccaaactttcactcttctgtggtaagaggaagaattcttttgagaccatttttagttctaatttccttttttggtatattaagaagaagataaaagaataatatatatctttcagctcctaggcatgtagaatttatataaacttgagcaattctgtgatatgtttgccactaataaaatgaataatgtcatttgactgcttggagatcacttattaaaccataaatctattattttgcttttagtatgctgaaattgataaagccccagatgaaagcccttacattggcaaatccagatacaagagaaatatgtttgccacagagagttatattattgacagtgctcaggcagtacagatcaagaagatggagccagatgaacaacttagaaatgatcacatgaacttgagaggccacacaccactggacacgcaactggaagacaaagaaaaaaaaataagtgcaggttaaaaaaagttattttaaattctttaaaaaaaaatatgaaaacattgaatatgtaggccaattttgttttataagtcttttaattgaacatgttgatggtattgtttccatgaaaagtctaaaacaaaagtagtgattatcaagcagatttatcgagcatttattttgtaatgattcctgttatggttaagaatggagtttttggcagtaatttgatggcagcatgtccaggggattcaagaatgagtaaatcccctccttcaaataagcactggaactatatattcgaagtcacaattaataataactgaagcaagtaaagaaccacttgattgattactatgcatgtagcaaaaacctaaagcaatgctttgtataagctgcaacagagcattctcctcaggcctgggccgaaggctagcctctgacttttcctgacatgccccgtgccccacaatctaattcaagggatcttaataccttctggcaagtcacataaaggaataagtcaaggcagggggacactttagagaccctgccaatgacagactttgaatctatttacccactcagctgcatggatatggaagaaagagaactctgaccagggtttgtgcatccccccagcattatggcccactgtggtgctctcagtcagaccagcggcttatctttccttgactggtagctaagtggaaggcatggaaggcaaatagaggttgacttggtgaaggaagaaaagaaactgagttatttatgtctgcgtatactatatgcaaggctctgggggaaagcaaaaataaatcagatttttatgcagactagctttaaaggggctggctcatagttttataggacagagggagagagaaatcttaaatttgaggttgaaaataattgatttgagatcatcaacagctgggagagagagctcagtagtgaatttcttgatattgaattccatcataaagcatttgcctctaacacaaggttttatgggttatttttaatatcctgaacctaattataacttagtaacatgtaaagtgcatatttcccaataaaagtcttattctctcaaaagggtttactagtgttgggaatagcccctttcatgttgagaattttacaaataaaaggatcaattatagttctataccatataatgaaacagtttattctagagattaataaatagacaaaagcgatcataagtaattactttaaaatttttttgtgagatataatgacagtttaatagagcagggagaaggttattacaaagaaagaatacctggttgaaatttcagaattcaagatttttcttgtttcatattatgtgagcatggtttttaaatttgcagcacaaactcgactatcagaactgcatgatgaaatagaaaaggcagaacaacaaattttgagagctactgaagaatttaaacaactggaagaagctatacaactaaaaaaggtatgtaaaagcaaagcagcaatgctaagaggaaatgaaaaatgaaatgtgtttttcccttcataaccatataaaacaatttaaaaagcagttagctgcctagttaattatggaatgataaatttcagagtcaaatatggttctagaatttgccaattgtaattttcttccatttatgatgacatccaattagcattttataacatgtatagaaataaattacttaattttatgtaaaaaggtgtagtcttgagaagttgcttcctgatctatctcttctattttaattaagcactctccacctttaagatcctgggacttagattaagaaccaggagatatctctgctatagcatgaacattgtcatcaaacacaagccaaaaaaaaaaagagatatgtggtatacaaaaagattgatgtaacatattctcaaaaattaccaaagtgtgttgtaaagtaagcgagtaagcagctcaaatccatgatgtaattgcataggggcaaaaattcaagaaaaggaagttgcttgacattttagtttttaaatgggtaaaaaggttttagttatttataacttttaaaaatcagtatttaaaaattatgatggtaactacattcataccacagtaggtagaacaacaatgtgaagtccaaattgtagattcttttaaaagatacactgtattgttactttcagattttatactaactagaaattgactcaagtttattggaaccttactatatgtcagtcactgggctgggcgctgattaatgaacaaaatagacatgtgtccctctcatggacagacttgtgggggaaataaggcaataaacaaaaaggaaaaaaaatatttatttaaaaaaaaggaaaaaagttaaaaagcatcagtgttgtaagaaaaaaatagaaaactaggggagatgttaaaagagatatactttagattgtggggattcacaaaggcctctctgaagaggtgacaggctaagatacaaaggatgagaaggagccagtgaggcagagctggcggaaagtattccatgcagaggtgacagtgtgcacaaaggccttcagactagagatttctctgcagaataagggagagtgtagaggaagataaagagtcttgaggttaaagatcatgccaggcttcataggcatttttttattttttatttttatttttttgagacagggccttgactcctgggctcaggtgattctcccaccttagcttccagaatagctgggactacaggcatgtgccatcactcccggctaattttttatatttttttgtagagatggagtctcaccatattgaccaggctggtcttgaactcttaggctcaagcgatctgcccgtcttggcctcctaaattgttcataagccatcttaagaagtttgaattttattttgcatgcaatgggaaatctttgaagggctttagatagttgagtggctgatcctatttgtcactttgccttacttcatgaagagtgaaatggactgagtgagatggaagggatgtgtgcatctgtatctgtcaggaggctgttgttcagtacaggcaagagatgatactagcaccaaccaggaaggtgctggtggatgtggagagaaagccagctgattccaggaaacactggacagtagaactgacaggacttaatgatgggttgaaagtaggagatgaggtagagggagctatcaagacggttttactaatttaaaaagaattttttataatagtactggccaaagctttacatagattgatagatgtaaataatgtacttaattttaaaagaaatagatacttccaaaatatgcttggaaaatagttatttaaatgagttaacattaacagttaataattaataataaagttaatagcctaaatttttgtttatactgttcacttacttgacatgctaacaaaggtaagcttcagctgggttctgattcagtgaaataaaaatctcaatttaataagagtttgctgtattttgaaattatttagtatgagatgattgtccagtgaacacggaattctaaaattttttcctgattataaaggtattgcagttatggggaattacataataatcgtccatattttatttcttttcagtcttttatcttcatcttttttacacttctatacagactcttgagaaatttttatatttgtttaaatctctatgctaaaaactgttagaaataagagatagagtattaagttattacttctatgtcaatactcaatttattggttgactgtcttcatattaaaactaattaggtaactgtagcgtagtagtcagtgaaattgtctagagtcacacaaagtcttgcttccacaaactcctagtatgaccttgggcgagatatttaaattttccatgattcagtttctttatctataaaattgggataattatactttttactttatatgttttgaggattagattaaaggatataaagaggctgggcatggtggctcatgcctgtaatcccagcactttgggaggccgagacgggtggatcatgaggtcaggagattgagaccatcctggctaacatggtgaaaccccgtctctactaaaaatacaaaaaattagctgggcgtggtagtgggcgcctatagtcccagctactcgggaggctgaggcaggagaatggcgtgaacccgggatgcagagcttgcggtgagccgagatcgcgccactgcactccaccctgggcgacagagcaagactccgtctcaaaaaaaaaaaaaagtatataaagagtttagaacagtgcatggcccatagtaagtgctatataaagttggctattattaatactatgtttattattaataatttacaagttgcctatactattatagaatgacagcttatttgtgcttgctattattagttttcataaacttttataaagtatgattttctacatataagcataaaaatataaaatatgcatggagtgcttagataactcccacatttcacttttatttttaaaaaactgatagaatatagaatacttattaaaattatagacattgtcttaataaatcagtgttgttcttctctgttaattatatattggggtttggggagattagatttcagaagcagggaaagaccttctttacaagcagttgagtggtagactacaacttgtaaataaattacgccaggaagctctggatctagaactgcagatggaaaagcaaaagcaggaaattgccggaaagcagaaggagattaaggacctgcaaatagccatagatagcctggattccaaagacccaaaacatgtgagtaaattaagaaattttgacttgttctgtctacatattacatgtctcatcattgttagcatcagagtccagagtcctttctgaaagtctgttttagtttgatgtacaaatttaagtgatatatacatacagtcagccctccatatccatgggttctgcatctgtggatttaaccaactgcagatcacatatattaggaaaaaaaaggatggttgtgtctgtactgaacatgtacagactttttttcatttgtcattattccctaaacaagacagtataacaactattcacatagcatttatactgtattaggtattataagtaatctagagatgattttaatatataagaggatgtccataggttaaatacaaatactatgctattttatagaagggacttgagcatcagtggatcttggtatctgcagggaatcctgggatgaatcccccatggatactgaaggaaaactgtacatatatgtgtgtatatataatgtatgtatgtgtatatatatgtgtattatacataaatatatgtgtgtgtgtgtgtgtgtgtgtgtgtgtatacacacacatatatggaatgtgtatgtctaaaacaaaacaacctagggcttgaagaaggtagctttcagtaaatgatggccgcatggtatatttatttttttttaagtggttgaatttcattgtattgcagagcaagggagatttgctccttacctttctctctccttgcctttttttcatctttctttctctctctctctctcttttttttttttttgctctgtcgccaggctggagtgcagtggcgcaatctccgctcactgcaacctccgcctcccaggttcaagcgattctcctgcctcagcctcccgagtagctgggactacaggcacccaccaccacgcctggctgatttttgtatttttagtagagacaaggtttcaccatgttggcgaggatggtcttgatctcctgaccttgtgatccacccacctcaacctcccaaagtgctgggattacaggcgtgagccaccatgccctgccgaagcgattctcctgcctcagcctcctgagtagctgggattacaggcgcgcaccaccacacccagctaatttttgtatttttggtagagatggggtttctccatgttgctcaggctggtctcaaactcctgacctcctgatctgcctaccttggcctcccaaagtgctgggattacagtcatgagccaccatgcccagcccttcatctttcttaagagcagaaaaagctgaagggggttgcgagtcctttttctacctcttctatttaatcctttttgcaaattttccactgaacgtatttgttttttcatactgttttgttttgtccttaaaaaaggaaacattctctggaatgtttcttcctgagatatggctagatatggtcaggtggctggatacagccaggctcttgtctctgtctctactctaagaagttgtactaattgcttatattttagctaatattcctaaaatacaaggaaaaatatcttctacatattctcctggtataccttgaataataggggttttttttttaaagaactttaagatctctggattaatagaaatcatagaatttaacatagtaaggatattgtaattgctttaagtacttgacaagttgtttaactgttcctttaagcattttagtacatatcatatatatttttttgtgggccagctaatttcaataaaggataaccttatgacagatataaggtcttttctaacaaaagcctaaaaattgaaaccaaggtattaatattgaaaccaaaagtagtcttgattattttaaataattttgaggaaaaatggggtattttaagtaatgtataatgtggtcaataatatcttactttattgcatatgtttgttcaatctcccacccatgtaaggtccctgaagacatgaactctatcctactggtatccgtatccccagggaccaaccagccctatgtttatgaatgcttgcattgtggaagggaggaaggaagcagcttatagatcctacccaaaactcctttgcttccccttccagttctgtgatctatgagtctaattagtagctggattatgtgtttgctttcaacaaatgactgttatatttctggcggacagagagttcaattcccactggatttctgtagagaattatacatagaaaggaggtaaatgagacatgggaatggcatccaagttttgaagttagctaaaatcaacctgtgcagtggggatgaaacatacaaaccagatttgaatttcctttttaattttattaaaattactaatagttcttaagtttgcagccttagtcctagcatcagaggacatctcttttaagtttatccagcgggaacatctttttctgattcacaaagtttcatattggctagtgtttggcatcccattttaggctacaaaatgtgagcctttaagcagaagagaaataatcaagagtgagatgcctgcatatttttctatagatataggtagacttttatttaattaatttttatgtaatcagatgaagtatctttctgaatagccaatagaatttaaaagtaaaagcttcactttgatgagatattatagaaagcaacatattaagtgcccacaatgtgtcatacattgtgctgtattttccatgttctggtgaggaacttttattaacatctatccatttttctttcaatttgcagaggatgaaaatgtgatatagaaatattaagtgaattgcccctaagttattgttttagaaagaggtggagcccttgcttatgctaccacaatgaccctctcttcacaaagcaattaaaggtctaaagagattattttaaaattagctcagaactaagcctaggcaggttttcagcaaatataagcatttaactaggtttcaaattcacagactattttagttataaaattattcatagaagcacaaattatcaccggagcaaacataatgaagatttgtattgcttttctctattgggaaatgtcctattggaagcaaaaggtaactgttcgctagagggaacgagctgtagtgatctgttgcaaagtttgggcgtgattggcccctgggagcttcctgtgttatgatttaactcgcggagggtggggcctgcccgcagaggctgctggtgattggatgggcggggccgccgctcactcttggccaagaatgtggtttgaggctctgcgaagttacagaggctcggaggcgcttgcaaaaatgtggctgtcagagagggaagtgcacatgaatttgaagacagcattagaaagcgttccgcccacagtttctctgttctcaacggctcagttttaacaggataaattttaagttaaggtatgatattttttctctctctgtacaaaggacttaaaaggaggaggagtcagagatgtaagttcctgtttttacagtaactcttttgtgagctccaccgtggtgtaaatcgcagaatctacttttgttcccatgtatttaatgtacaccattggcatattgaaccagatttttatcctgcgtataaaggttttggtggaatttttaatggtgaattttaaagatttattgatatgagtgcagtcttttaagaaattatttcttgagccataaaaacccgaaatttacttagaatgtaagctgttatatgtagttaacttttcagaaagatttcaaatgggtattttgggagtgtagggaaaagagtttgcaaaataccataaagctttaccagtagtaaattaaaaaccttccagttaagctgccactcttttgttcatcagaaatgaagagacgtttctttcttgtatttggggtaagcaaatacataaaattgagtaatattcttttataatcacatgggtcttagacttgagatcattggtgttcatttttctgactgatacagttccctctttcgataactttctcttcatttattgttgtattcctctgatcctgtgggtaccaacttaagagtcatgaaggtgtgagtgggagggcaaaggttctctggggaattattttgtctccatatgaacagttgcctcaggagacatgcaagtcatttgatggatctgaaattcagttttctcatgtttaaaaggaagggttagactagatcattggctctcgatttgctttccctagcacacctgagaaatacaatccattcttttcagttaacagtagttccctgatgccatgacttcagggtgcgggagggtgtgtgggtgtgtgaaagctctgttttccaccatgggttaagtgtagttgtagaggggtatacctccttagggccctccattttgagactcaccgggctaagtggtctttgaggtccctgtcagctctcagtttattgaaaagccaaatgtttgtttgtataagagattgaaagtgaatttgaatttcaagtattttatctatttcatacctctattttcttctaagaaaccttttttaaaaagtagatttaatttttttattaaaaaggcattacttatctactataaaagttttttaaatataaaaatactcattacaaaaggaaaaaatccccatgtaatccttccacccaggtataattcttgttagcattttgggatatagtttttaagtctttttctatagatatatgccataaccaactaattttggaaaccttttttaaaagacacattttaggctgggcacggtggctcatgcctgtaatcccagcgatttgggaggccaaggccggcagatcacttgaggtcaggagttccagatcagcctggccaacatggtgaaactcccgtctgtactaaaaaaaacaacaaaaagtaaaaacaaacaaaaacctgggtgtggtggcccgcacctgtagtcccaggtacttgggaggctgaggcaggagaattgcttgaacccaggaggcggaggttgcagtgagctgagatcgtgcctctgcactctagcctgggtgacggagtcagactccatctcaaaataaataaataaataaataaaaaagagagagagagacaatttaatgcaacgcaaataacactgacctacctagctgtgcccttggaaaaaccacttaacctctttgatcctcagttttctcacctgtaaagtggaaatgatttccgtatcaagttatcctgaaatttaaatgaaaactacccatgtgaaaacaatatagggcctgacacaaatagatgcaaattattatatttattttctattcttcctttaaaaatgttgttaagggttattacttttaaaggagtttaaggaacttggagttttgttgatttttttttttaattcagtcccatatgaaggctcaaaagagcggtaaagaacaacagcttgacattatgaacaagcagtaccaacaacttgaaagtcgtttggatgagatactttctagaattgctaaggaaacggaagagattaaggaccttgaagaacagcttactgaaggtaagactttcagtatgatttaaggtaaatcagtgttattgctggtaaaagaaacattataaagacaagcattaatccagatagtagctaaatacagttcacctattagtactagtatttgatagggaaatatttacaggatacccaaaagtagttaatgcaattttaagagttttgtttttgttttgttttgtggcattgatgcctagtgagtcaggtcattccagtcagtaggccagaagtcaatacgtgatcatgataagctctggcatgtgattgtctatgacataaaatccattcaggagcaaagcacccattggcatcagggaattcagtgtctggttataagaagaaagagttttaggatctacttttgcaatgctgatttaaactgcgacatatccataatagtggaaaaggaagacaataggccatagtggtttttacacatagggctcagtgtaaaaagatcctgctctctgttttgctactgtcagctgtgtcgccttggacaagttgtttttatctcaatcattagttgttgggagaattaaatgagctagtattcataggccaggagtggtggctcacgcctgtaatcctagcactttgggaggctgaggcgggcatatcatttgagcccaggagttcgagatcagcatgggcaacatggcgaaaccccgtctctacaaaaaaaaaaaaaaaaaaattagccaggcgtagtggtatgtgtgcttgtggcaccatctgcttgggagactgagggtggaggatcacctgagctcagggaggttgaggctacagtgaaccgtgattgtgccactgcactccagcctaggtgacagagtgaaactttgtctgaaaaaaaaaaaaaagagagagatagtgttcataaagttcctggcacatagtgcgtatccagtactgtacatgggatgtgtgtgtttgtgttctaagtgtttaggttacacatttatgttgccagtcttggattcatcttatatactgggtggtcttgttctttgtatttagcagcaagaactcacagttttgctacatattttttattttatttgtaaattaaactttttttttttttttgagacggagcctcgctctgtcacccaggctggagtgcagtggcgtgatcttggctcactgcaacctctgcctcctgggttcaagtgatcctcctgcctcagcctcgtgagtagcagggactacaggcacatgcccggctaattttttgtatttttaatagagacggggtttcactgtgttagccaggatggtctcgatctcctgacctcatgatccgcctgccttggcctcccaaagtgctgggattacaggcttgaaccaccacacccggccgaaattaaactttttacagcatgaatcaggcattttataagcattgccccctaaatgtactatttttattttatacctgcttaatactcctttgctatctataataggaagaaaatttaacattatgttttgaaaaagaaaaatgataggaaagaattgaaagcttagaatttcactcttggcttataacaaaatgctgagcagacaatgcagtactttaaaaagatatattattaccctttttgcatcttgcttaggccagatagcagcaaatgaagccctgaagaaggatttagaaggtgttatcagtgggttgcaagaatacctggggaccattaaaggccaggcaactcaggcccagaatgagtgcaggaagctgcgggatgagaaagagacattgttgcagagattgacagaagtcgagcaggagagagaccagctggaaatagttgccatggatgcagaaaatatgaggaaggtatgatttttttcctgcctattttccttagcttcataagtagataatgtccaaattaagttagttggaggaggtaacagtacatttttaagtgggaaaaagtattagtggctatatggtgatttttttcttttaacagttgggcttttttttttcttctttagctgtgatacatttggaattattattttttctttgctcagaaaaggaagattatttaagctgcatttctatccctgaaaggtattgttgccaaataactccaaagaatatgaaatggtagctattacaaatattgtattaaatgctcatattttatttgtgctgaaaaattgagcacagaatggtttttcttagtcttgttgttactggataattttaacattattttatagctaacaaaacagacatattgttttaaattatatccttatgaacctgatttgttgcacattcgtttggagatttcccttgctctattttagttgtttggaaaatgttatcatacatgagaactagagatttccaaacttcttgttcagtagagctggctccagaaattgaattaatatattttaatattatgaaatatctcaggcatatttaaaaaatcacaaataatatttaacatcatgtactgacaacccagcttaagaaataaaacattataggtacatttgaaatcctctgtctactcctttccagaagtaacaaagttctgaatatggttattatttccctgcacctctattcttttattatatatgtaaacatccataagcaatatatagtattttccttgattttaagacttatacaaaatgtatcatagtgtacatatttggccactttctttcttccttcatgtttatgtttttgtttgtttgttttggttttttttttgagatgaattttcgctcttgttgcccaggctggagtgcagtggcgcaatctcggctcactgcatcctccgcctcctgggttgaagcgattctcctgcctcagcctcccgagtagctgggagtacaggcattcaccacctgcccggctaattttgtatttttagtagagatggggtttctccatgttggtcaggctggtctcgaactcccgacctcaggtgatccgcctgccttggcctctgaaagtgcttggattacaggtgtgagccacagcgcctggcctatgttttcgagaattatgcacactgatagatgtagttctactttgttcatttttactgatatatgtaccatcctgctttatggacataccacaaatttattatttattccttctctttttggggtgcatttaggtgatttccagtgttatgctattgcaaacaatgctgagcataacattcctgcacacatcttgaacacatggggactatgctcagaagcagaactgtgggtcagagtatgtccatccttcattaagttcagtagatattgtcaaattacttttcatagtgagtttatcagcttctactcccaccagcaatgtgggggctaccattcttgccacatccttgccaacgctgtagtgttgtccaacttttttttaaagcttatattttgaaataactccaaacttgcaggaaagttgcaagaggaatacaaataactcacatttgcctttcaccgagagtcaccaattactattttaacacatttgctttatctcctcatatgtaatttctacatgattttatatactttttaattattattatactttaagttctagggtacatgcagatttgttacataggtatacatgtttcacgttggtttgctgcacccattaactcgtcatttacattaggtatatctcctaatgctatccctcccccctccccccaccccacgacaggccccggtgtgtgatgttccctgccctgtgtccaagtgttctcattgttcagttcctacctatgagtgagaacatgcggtgtttggttttctgtccttgtgatagtttgcaaagaatgatggtttccagctgcatccatgtccctgcaaaggacatgaactcatccttttttatggctgcatagtattccatggtttatatgtgctgcattttcttaatccagtctatcgttgatggacatttgggttggttccaagtttttgctattatgaatagtgccgcaataaacacatgtgtgcatgtgtctttatagtagcatgatttataatcctttgggtatatacccagtaatgggattgctgggtcaaatggtatttctagttctagatccttgaggaatcgccacattgtcttccacaaaggttgaactagtttacactcccaccaacagtgtaaaagcattcctgtttctccacatcctctccagcatctgttgtttcctgactttttaatgatcaccattctaactggtgtgaaatggtatctcattgtggttttgatttgcatttctctgatggccagtgatgatgagcattttttcatgtgtctgttggctgcataaatgtcttcttttgagaaatgtctattcgtatcctttgccccctttttgatggggttgtttttttcttgtaaatttgtttaagttctttgtagattctggatattagccctttgtcagatgagcagattgcaaaaattttctcccattctgtaggttgcctgttcactctgatggtagtttcttttgctgtgcagaagctctttggtttaattagatcccatttgtctattttggcttttgttgccattgcttttggtgttttagtcatgaagtccttgcccatgcctatgtcctgaatagtattgcctaggttttcttctaggatttttatggttttaggtctaacatgtaagtctttaatctatcttgaattaatttttgtataaggtgtaaggaagagatccagtttcagctttctacatatggctagccagttttcccagcaccatttattaaatagtgatcctttccccatttcttgtttttgtcaggtttgtcaaagatcagatggttgtagatgtgtggtgttatttatttctgcagtctctgttctgttccattggtctatatatctgttttggtaccagtaccatgttgttttgtttactgtagccttgtagtatagtttaaagtcaggtagcgtgatgcctccagctttgttctttttgcttaggattgtcttggcaatgcaggctcttttttggttccatatgaactttaaagtagttttttcgaactctgtgaagaaagtcattggtagcttgatgggaatggcattgaatctataaattaccttgggcagtatggccattttcacggtattgattcttcctacccatgagcatggaatgttcttccatttgtttatgtcctcttttattttgttgagctgtggtttgtagttcttgaagacgtccttcacatcccttgtaagttggattcctaggtattttactctctttgtagcaattgtgaatgggagttcactcacgatttggctctctgtctattattggtgtataggaatgcatgtgatttttgcacattgatttttgtatcctgagactttgctgaagttgcatatcagcttaaggagattttggctgagacgatggggttttctaaatatacaatcatgtcatctgcaaactgagacaatttgacttcctcttttcctaattgaataccctttatttctttctcttttctgattgccctggccggaacttccaacactatgttgaataggagtggtgagagagggcatccctgtcctgtgccagttttcaaagggaatgcttccagtttttgcccattcagtatgatattggctgtggttttgtcataaatagctcttattattttgagatacgtgccatcaatacctagtttattgacagtttttagcatgaagggcaattgaagtttgttgaaggccttttctgcatctattgagatatcatgtggtttttgtcattagttctgtttatgtgatggattatgtttattgatttgtgtatgttgaaccagccttgcatcccagggatgaagccgacttgatcgtggtggataagctttttgatgtgctgctggattcggtttgccagtattttattgaggattttcacatcgatattcatcagggatattggtctaaaattctctttttttgttgtgtctctgccaggctttggtatcaggatgatgctggcctcataaaatgagttaggattccctctttttctattcattggaagagtttcagaaggaatggtaccagctcctctttgtacctctggtagaattcagctgtgaatccatctggtcctggagtttttttggttggtaggctattaattattgcctcaatttcagatcctgttattggtctattcagagattcaacttcttcctggtttagtcttgggagggtgtatgtgtccaggaatttatccatttcttctagattttctagtttatttgcataaaggtgtttatagtattctctgatggtagtttgtatctctgtgggattggtggtgatatcctctttatcattttttattgcatctatttgattctaccctcttttcttctttgttagtcttgctagcggtctatctattttgttgatcttttcaaaaaaccagctcctggattcactgattcttttgaagggttttttgtgtctctatcccctttagtttggctctgatcttagttgtttcttgccttctgctagcttttgaatgtgtttgctcttgcttctctagttcttttagttgtgttgttagggtattgattttagatctttcctgctttctcttgtgggcatttagtgctatacatttccctttacacactgctttaaatgtgtcccagagattctggtatgttgtgtctttgttctcattggtttcaaagaacatctttatttctgccttcatttcattgtgtatccagtagtcattaggagcaggtcgtttagtttccatgtggttgagtggttttgagtgagtttcttaatcctgagttctaatttgattgcactgtggtctgagagacagtttgttgtgatttctgttcttttacattttttgaggagtgctttacttccaactatgtggtcaattttggaataagtgagatgtggtgctgagaagaatgtatattctgttgatttggggtggagaattctgtagatatctattaggtctgcttggtgcagagctgagttcaattcctggatatccttgttaaccttctgtcttgttgatctgtctaatattgacagtggggtgttaaagtctcccattattattgtgtaggagtctaagtctctttgtaggtctctaaggacttgctttatgaatctgggttctcctgtattgggtgcatatatgtttaggatagtcagcccttcttgttgaattgatcccttcaccattatgtaatacccttctttgtcgcttttgatctttgttggtttaaagtctgttttatcagagactaggattgcaggccctgcttttttttgctttccatttgcttggtagatcttcctccattcctttattttgaacctatgtgtgtctctgcacatgagatgggtctcctgaatatagcacactgatgggtcttgactctttatccaatttgccagtctgtgtcttttaattgggggcatttagcccatttacatttaaggttaatattgttatgtgtggatttgatcctgttgttatgatgctagctggttattttgtccgttagttgatgcagtttcttcctggcattgatggtctttacaatttggcatgtttttgcagtggctggtacgggttgttcctttccatgtttagtgcttccttcaggagctcttgtaaggcaggcctggtggtgacaaaatctctcagcatttgcttgtctgtaaaggattttatttctccttcactcatgaagcttagtttggttgaatatgagattctgggttgaaaattattttcttttaagaatgttgaatattggcctctactctcttctggcttgtagagtttctgagagatctgctgttagtctgatgggcttccctttgtgggtaacccagcctttctctctggctgcccttacattttttccttcatgtcaaccttagggaatctgacaattatgtgtcttggagttgctcttctcgaggagtatctttgtggtgttctctgtatttcctgaatttgaatgttggcctgccttgctaggttagggaagttctcctggataatatcctgaagagtgttttccaacttagttccattctccctgtcacttttcaggtacaccattcaaacgtagatttggtcttttcacatagtcccatatttcttggaggctttgttcatttctttttactcttttttctctaaacttctcttcttgctttatttcgttaatttgatcttcagtcactgataccctttcttccacttgatcaaattggctactgaagcttgtgcatgtgttacgtagttctcatgccatggttttcagctccatcaggtcatttaaggtcttctctacactctttattctaattagccattcgtctaatcttttttcaaggtttttagcttcctttcaatgggttcaaacatcgtcctttagcttgaagaagtttgttattactgaccttctgaagcctacttctgtcagctcatcagagtcattctccatccagctttgttctgttgctggtgagaagctgccatcctttggaggagaagaggcgctcggtttttagaattttcagcttttctgctgtggtttctccccatctttgtggttttatctacctttggcctttggtctttggtctacctccagatggggttttggtgtggatgtcctttttgttgatgttaaggctattcctttctgtttgttagttttccttctaacagtcaggtccctcagctgctggtctgttggagtttgctagaggtccactccagaccctgtttgcctcggtatcacaagtagaggctgcagaacagcaaatattgctgcctaatccttcctctggaagcttcttcccagaggggcacccgcctgtatgatgtgtcagttggcccctactgggaggtgtctcccagttaggctacacgggggtcagggacccacttgaggaggcagtctgtccgttctctgagctcaaacactgtgctgggagaaccactgctctcttcagagctgtcctacagggacgtttgagtctgcagaagtttctgctgccttttgttcagctatgccctgctcctaaaggtggagtctacatgtagaggcagaggtcttgctgagctgcggtgggctccgcccagttcgagcttcctggctgctgtgtttacctactcaagcctcagcaatggtgaacgcccctccccctgccaggctgctgcctccaaggtctatctcagactgctacactagcagtgagcaaggctctgtgagcatgggacctgctgagccaggtgtgggatatgatctcctggtgtgctgtttgctaagaccattggaaaagcacagtatttgggtgagagtgtcctgtttttccaggtactgtcttctgtgaatgtacggcttcccttggctaggaaagggaaatcccccgacgccttgcatttcctgggtgaggcgatgccctgccctgcttcgggtcgccctccatgggctgcacccactgtccaatcagtgccaatgagataaaccaggtacctcagttggaaatgcagaaatcacccgtcgtctgcgtcgatcacgctgggagctgcagaccaagctgttcctatttggccatctcggaacgggattcaattttatatatatttttatacagattttttttcctgaaccatttggaaatcagttgtagacatcatgctcctttgcttctaaatatttcagtatgtatttcctatgaacaaggacattttctaacataaacacagaataattatcaaatttaggaaattcagtattttatcagacttcatgtttgccagtctgctgagctttaaaggacttctttccatctttctattgtgaagatgtttacagttacaagaaagttgaacaaatagtttggtgaacatctgtgaacctcttggattcaataaatattttgatttatttattttctctttctcatagacacatacttttttcctttgctcattagaaagttgtagatatcataacatcatcccttcaacacacatttttttaagagcattttcctgcatcactacgatatcattattacacctaagaaaaatgacggtaattccctaatgtcctctaatatcattattatttttttttttttttgagatggagtcttgctctgtcaccaggctgggaatgcagtggcatgatcttcgctcactgcaacctccgcctcccaggttcaagtgattccgctgcctcagcctcctaagtagctgggactacaggcgtgtgccaccacgcctggctaatttttttgtgtgtgtgttttggtagagataggtttcaccatgttggccaggatggtctcaatctcctgacttcgtgatccacccgccttggcctcccaaagtgctgggattacaggcatgagccactgtacccggccctaaggtcctctaatatctgaaccatattcagattttcttgattgtcccaagaatgtgtgtgtgtgtgcacatgcgtgtgtgaaatccaggctggtattctgtagattgaaccacgttctgggtttgactgattgtttcctcatggtgtgtttaacttgtatctctatgttctatgtaaaatagtatcttaagttaactgcattttcccctggttactggagaggctgatcacctttcatttgctgttcaagtttcctcttgagtgaattccctattctattttttgttgaactgtctctgccttttcttaaagatttgtaggaattctttacatattctggataataatctttggttggttatatgtagtatctatattttaaacaagcagcccaaatgattgaattgccaagtggtttttggacaattcttttgtagaagttctcatcgtagaatcctcctctttaatctgtaatagtttgatcccaagtaaatagatgaaagagataaggtttaatcacaaaacacaaatggactaaaatgaatcagaaccatggtatgctaataaatatgtacttatattcttgttagcactcatttaaggtactcttatcatccttaatattagagagtgccggtcccattttgttcttctgataaatgaacatgctatggtttaatagagagagtatgggctttggagtcggagatctacatttgtatgctgactatcctttttctagctacatagccctgtgcaatttacttagatattcattctacaattcctcatctgtaaaaccgcaagttgccttatacagttattgtgaagatacaatgaaataatgaatatgaaaacattttgtccaacatcagatgaaaaataagcattaaatcttatcctactctttttttccttcctttcttcctccttatgtttttagactcataagtatcacagaactggtccctttgaaaaacaatatgttgggagcttactgactttcttgattacatttagccagggttttgttttccaaccaggatatgcacaacctgaggcttcgtcatattgctactgaaaactttgtggcaggcatcagtagctggccagcatttggtttacagtgctcaagttacttataatgccttgcaaatgcttaagcagcacagtgagggttccatagttaaacccactgaatctttctaggagcttgcagagctagaaagtgccctccaagagcagcatgaggtgaatgcatctttgcagcagacccagggagatctcagtgcctatgaagctgagctagaggctcggctaaacctaagggatgctgaagccaaccagctcaaggaagagttggaaaaagtaacaagacttacccaggtaagtaggagcatgaagccaactgcaaactaaggaccctgtgccttaagatatcatccttcttttatttatgtcttaatttaaaattaagcgttttttcatacaatatatatggagtgatgggaaaggcagaattttggagtcagacattgtgagtgctaataactacccctgtgtgaacacgggcaaatcagttcatagctctgagcctcccagccttttcctcctgtgtaaaatggcttatggggaagataaatgagataatggacatgaaagcacctgacagttgatactcaataaatgctagtttttccttcttagaacaggtttaaggacttttttttttgagacagagtcttgctctgttgctaggctggagtacagtggcatgatgtcggctcactgcaacctccgcctcctgggttcaagtgattttcctgcctcagcctcctgagtagctgggactacaggtgcgcgccaccatgcctggccaattttttgtatgttagtagagatggggtttcaccatgttggtcaggctggtctacaaactcccgacctcaggcgatccacccacctcagcctcccaaagtgctgggattacaggcatgggccaccgtgcctggccgagacctcttttaggttgatgataagttgtagtttgctgtctccttttagggttggttgaaagatccactagtttaaattatacttgcaagttacagaaaacatatccaataaatatttattgattggccattgagggccaggtactgtggattctctagggaaagcacagacatggtcaccatcctgtggagctgacagatctctgattggtaaactttagtccagcaagtgaaacaggtatggaagaaagaaagggacaggattctttggccaaggaggaagtagtcagggaagaccaccctacagaaatgatgtttcagctgatggctgatggatgagtaggatttggccacgcagaggggacagggtgaaaggagtaaaggtaaggtatttgtattctaggcagagaggtgaggagagagagcatatagtacatttgaagtgctgaacgtatgcctccaggatgccaggagcagggagaggagtgaggaaagagaatgagaggtaaaggcagagaggcaggcagaggccagttgtaatatattctttatcagattaaaaatacaatttattagccagatgagctgcatcttctttcaggaagcccacctcaacctttcctttctgcctgctgaaaatctgggttcaggactctactttggttttcctataacctgtgcacagtaaaggtatttatcatgcatatgatgatcatctgtttagatgctcctagatgatctgtttgttttaccccagctagactcagagctcagtgaatgcccaaattgtatctgtttgtttctgctttttctgtgcctggcatatgagaagcgtcaatatgtgcctatttgatgaaaatgaaataaataagatattttgaatctcaggaatgcatgtaaaaataattcatatggttagaaaaggaactagaaatatatctggtttattatagtaattatgtatatttctttacttatgagatatcagatcatcacttgacagttgtcaggattgtatttctcgagtaccgagttttgtagaagtatagttgacaagatcagagtctcagaaatcaggaggttttaggaaaacaattaaaataacagtaaatattttaaaataataataaataaaatttctagatggcattttccttaataaattctcctcttttcaagccagactgtactagcttgaaatacactgtcctttgtactttgattggcttttattttcttctcataagtcttgacaaaattattttaagagcctggccttttcaccaattcacttggtattgaaagggacattccccctccctcagcaccaagactgccaggattggtcttcaaaccacacattgagaatatgaagcataacagatctcctgtctctgatctgaagatctacagatctctgattggtaaactttagttgcatgaactcacttgtgatgcttgataaatacagattccttggccccacccactctagagattctgatccagaatctcttttctgagatagagtttaggtgtctgcatttttaacagacatacctagtgttgatacagtttttttgaggaccacagtttgagaaatactagtctaagggaaaggagagcaataattgttggatcacttgcagaacttttaaaggtaggtgcctcggcccacccctgaagattctgatttggtgtatttgggctgagctgattctgatgcttactccttcttaagtgttaataatagtttaaggattgtgtgaaaaaattatctttggtttttaaatttgggagtacaaacataaaattgagttgtaaaactatagctagcaagggattgtgtgtatatgtaaatttatttgtgccttttaaaatcataaattattgctgttttacactttcatgtcattgcttcctatggtgacagttagaacaatcagcccttcaagcagaacttgagaaggaaaggcaagccctcaagaatgcccttggaaaagcccagttctcagaagaaaaggagcaagagaacagtgagctccatgcaaaacttaaacacttgcaggtagagatttgttgttttagaatacattcttacacagaacacccaaagatgatgatatctttagtcaggcacttagcaacctgctctaacatgtagtaagcaatttgaattactagaaaaaagggaattctgggtggagcagcaccatagctcctgttctcttgtgaccattgttttaagattattatttgtgaatctccttttgtttttatgatggtgcaaagagatagaggcagtgtcagtagtaaacaatatactgtgtaaactcatgggcaaaagcagtatcttgcttttcttctaaaagcagatttgtcaccagaccaaactaaaaggatcagattggtgcatcctcttccactgaaatgtctttgtaattatccaggaatttaactagagtgagttgcagtgggatttcttatctgtaaatagttttcactaccctcttctcggaaaggatgctattaaaaatgtcatcattttttatttgtgggaatgtatgtcaatatttttatagctgttctcacagtaatctgctgaacaaactgcaggaaaaacaggtggataggatttttcagataattaaactctcgaagaagacagatgtctgaacaaacaagtacctgaatcatcactcaggtctccaaatctgtgaggttgcgggcctcttggctggctgagatggtagctgttatcaccagaaataaaagggcagagtttatgtggcttggaggaagggttccaaaaaaaactacgtagggggatttgagagaaataagactaaactcacccaaatgttctcttcttctaacacttcaaatatttgttccttgaagtttaaagaaatctaataacctggaatttaatttttactgctctcagttccacttctgaagcaaatatcataaaagatatacatgttttccattactatgtgaggtgtgtgtgtatgttgggtcttacttgagttatcattttccatttttagtatagaaatttgcatataacacaaaaacagaatagcttatgacccttatttacccattgcccaacctaaacagttgtcaacattcattgtttcattttgtccacctcttttgttgctggaatattttaaagaaaaatttcatacatctttctttcacctgcaaatacttaagtgtacatctcttgcagaaaaggactaatataatattcttcagggggcttctccaaagtagaaagtgaagtcaactttctagaatgctgacacgtgttgtgggactaccttagttagaactagattctttgattacttggccaactaacctcctgagtacaagttaaacccactctacatgtctttgtcagaaatcatttagttgcaatgaaccaaaacctactcacactagctcaagaaaggagacagcttgctaggaaccagagctgctctgcctttcatgttgatataggggctctctcatttctctttttccatctctccgagcattgtatgtggcccagcatagaccccagccctgatttaacatattttcaggtccagcatttatataggcttgctgtactgaatcttgcttcaaattatggagagaatgagaacctattttctggctagttgatgtgttgactggcctctagtcagatgatctatggccaggattagatagtactacagaaagggctgccttggggcaatgggcatggacagtttacagataaagaggactccagatggaacaggcacttgaaaacatgttaattgcattctaaattcttcatttcagttaacattgttacactgagtttgaagtagattaatcatacggaaattttagaaatttctttttacttgaaagaggcattgtctgaatttagttctgtggtctagatatgtttgttagttcgttagtagtgaaaatatgctggcatgtaatagataatccctatttcatccccctccataggatgacaataatctgttaaaacagcaacttaaagatttccagaatcaccttaaccatgtggttgatggtttggttcgtccagaagaagtggcagctcgtgtggatgagctaagaagaaaactgaaattaggaactggggaaatgaagtaaggaaaaagcaagacctccaagtctagagtgggcctcacaacttgagagttgtgagtgtgaggttcaatgataaactcacctttctaagttctgttaatggcaaatttcttttgtaaggttctccttatgaagttttcatgactgagacaaaagattgtttaatttatttgtctgccactgattgtttttacattttggatcttttttttggtatttaagagtaatatttggtatttaagagttattgtttcttgaaagttaattatatatggtcaggaagtagagccacattatacattttaaatagagaagaaacatcaaaagaaaacataattatttcaaatatatgaaatgggcatttattcttggagcaaatattgttagcctgatatgagcctatgttttcagagtggcagcagtcatttgataaagcaataatttgcgcttaggagatggtcagtaaattgctatagattgacaccagtccctgcacacagctttttactctggagctaaagttaatagcatgtttgcagccagcatcaaaaattaaatgtcacatttataccatttttccccctccttactagcatccatagtccttcagatgtcttagggaaaagtcttgctgatttacagaaacaattcagtgaaattcttgcacgctccaagtgggaaagagatgaagcacaagttagagagagaaaactccaagaagaaatggctctgcagcaagagaaactggcaactggacaagaagagttcaggcaggcctgtgagagagccctggaagcaagagtaagacaagggcaagaggcacctggagggaagtgtttggcaaatattaatgtttttcagcaaattacaatgcttcctttgtcatgtaaatacaacataattgttgttattttcacttataacaagtcaagctgggtgtgactaaaactcaaccctgaatgtggttataatgtcaaagtcaggcttgtttgtgacattgtgttttccttgatttagaagcaaaggcaagttattttataacaggcaggtaaataatgccacattcctagagtatggtgtgttgccagaatctggtattttttgatgtgatgattttaatgaagaggcaaacattccaatgactcctagagatcgttcaagataaaaccattcctgacaactcattagtaaaaaattaagttacagcctgttgtaaaatgggtgataattctataaaaagtttttattttgcttaaaacatattttgcctaaaaatcattcttgaaattgtatttcttcacagatgaattttgataagaggcaacatgaagcaagaatccagcaaatggagaatgaaattcactatttgcaagaaaatctaaaaagtatggaggaaatccaaggccttacagatctccaacttcaggaagctgatgaagagaaggagagaattctggcccaactccgagagttagagaaaaaggtaggggagacttagaaaatgagacacataagtacctgctgccagtgtcctgcccactggcaactaggtcagctgagatgggtgtgatctgtagtcacctctggctgcattgctggcacagtgctgaacctgacctaggtgggacctggatgcatgtcattgaatcaagaagctaagaccatgtgttgtggtagatggaaacgagaattgagaatgtaaggagtgactttcaagttaattaggtggtacttaacaaatgatattgggaggagtttgactcctttgaaacctcttgtccagttggatacatccatgggaaattacttttaaactcctcatcatcctttctaatacccctgcctctctttaatggcttttctccattccacctcaaccatctactcccattgtcacattctggactttgtcaagtttaaaaattgcacccacctctgaaatcacaaactgaagtgtcttgctctgatcataaccgcttatcttgctggtatccacacacttaaaatttgtcagccttattgagcttccagttcattagcctcacccccacctttgctatctgttaagcccttgtctttactttcttacttgtccaacttaaattttgtggtctaccaactataacttttttttttttaacaaatatcctcaagttccttgcccttttctactgttttatttccctgacaaaactgaagctctctgctttctttgggccagcacttccactggttgttcctggagaaaaaagtcaccatccagtattgtggtgtcattataaactcatagttaccagtctcaaatagacaatatgacccttttctgtggtgagcttcctctcccatgcctcactgtttcacaccttctcattcctcacacctgctgtctgctttctcccagcctcagtgaatgccttgcttcatccttccctgagaactcttcagtttccaagtcctattgaatccatctctaaaatgtatctggaatatatgtcctttttccttctctgatgctagacccttgtgctgtcatcatctctcttctggatgactactgtggctgtctgatggatctgtcacttctactcatgaccctgctccccagagcagccaagatgctctttctgaaatgtcaagtggctgtaatcagtctcccctcctgtagcttcctttgttcttaggagtaagaccaaaattcttaagcctacgaggcctacatgatttgcctctgtttagatctctccatttctcactgtgctcctcctatcattttctcaaaaatgccaaattcttgtgccaccatcctatgcccagggcctgattcagtgatttcaaaggcaggttcatccatgccgtggtggtagtgctaggaaatgtttttccaatgaatggatgaagttatgaccactaagattcttgactaagaagacctagtccaagtttctcacagttttgagatctattatttattcattggatatatgtggagtacctcctgtgtatcaagtattgttctaggcagcagtgaacagagtccctaccctcctggagcttacatctgaattcattcctgccaaatgattcatctgtttaattaatatttcttttattttagaagaaacttgaagatgccaaatctcaggagcaagtttttggtttagataaagaactgaagaaactaaagaaagccgtggccacctctgataagctagccacagctgagctcaccattgccaaagaccagctgaagtcccttcatggaactgttatgaaaattaaccaggagcgagcagaggtgagttcacatgtacagaacaggtttccatcaatgatgctgctgtcaaaaaacatggcaacttgtattattgatcttgctatagacattggttattttataaaccactgtaaagttgtctgtttttcttaagacctaaagattatattccccccatcacaacccccaataatttattttgtgctgccatggatactgcgttctactgagccctgaaaggaatcatcaaataaacatgctatccctacctttaagtgtaaggatgcttagggaggtagctgtcaatatctacctggacaagggttcctgaaggattgttatataatccctctgaatctcaaatttttcatctcgtgcagtcatgtgaaaatgttacttcatagtatgactccttactgagctaatgtctgttactgtgctttataggatgcaaatgctaatgagattaagatagcagatcataggagacaaaaatctaatgatgagagcccagagagacataatcatggaagacggtagtaaaagtaaaaaagtaaaaaaattagcctttgttctttctgatgccgcaccttggggttgggagctgggcaggctgcccaacaatgggaacaacacaggagaaggtggggcttggatgtcccttttcatggacagcctggtaggcaatgtgatgaaagcagaagaatcaatccaagaggaagaaatgaagaagacaacctgtgatagcagtggtgcctttctcatacttctgtcccagtaggagttgcaggaagcagagaggttcagcagaaaggcagcacaagcagccagagatctcacccgagcagaagctgagatcgaactcctgcagaatctcctcaggcagaagggggagcaggtcagtgttggtacccagagacctcctctttctcagattcttatcagttcctaaaagacaaaattactgtaggtgatgtctcaaagaattctgaagtgcaatcaatagttaataagtactttatcctctactgtgtgccaggcttggtgcagtttccaagtaatgcagtttcctcactgggaaagtgtaaataaatatagaatcataatcaagttgaaaggataaatgtgtttgggaaagaatgaattcattggcaactttgtatgtgtaatttttttaaatagtttcgacttgagatggagaaaacaggtgtaggtactggagcaaactcacaggtcctagaaattgagaaactgaatgagacaatggaacgacaaaggacagagattgcaaggctgcagaatgtactagacctcactggaagtggtaaagtattgggctttgatttttggcagtggttttgtagtcataaaattaaatcatctcatttgttttttacctttaactgttacaaatcaagtccatgcttgattcagagagctgtggtaattagcttaataagtaaaatcaaataaatcagataattttaagagtattttctgtaagtgtgttactgggggacttggttgccaagataagagtttcgtatttgtgggcgagcacagtggctcatgcctgtgatcatagcactttgggaggctgaggtgggtggatcgcttgaggtcaggagttcgagaccagcctggccaacatggtgacaccctgtctctactaaaaaatacaaaaattagctgggcatggaggtgggcacctgtaaacccagctactcgggaaggtgaggcaggagaatcacttgaacctgggaggcagaggttggcagtgagccgagattgggccgctgcactccagactggatgacggagtgagactctgtctcaaaaaaagaaaaaaagagttttgtatttgtaatttcaaaataaataatgtttacaaatcagtttgcctttttttgacttaccaaagggcagactgaaagtcagctttgaggaactgataaaattaattggctctcttagaatctcttttatattttgagaaaggaagtaagtgatttcatatcaatttcatagaatgacttttctttacagacaacaaaggaggctttgaaaatgttttagaagaaattgctgaacttcgacgtgaagtttcttatcagaatgattacataagcagcatggcagatcctttcaaaagacgaggctattggtactttatgccaccaccaccatcatcaaaagtaggaattctgtggtgttgggaatgtatactgaattttcttgaagaaagtgtgacattgtccccttccccaaatttatgaacaggtaccaaaaacaacatttctatgctaagccgtgcattgaggttctgtagcgtttttaatatttgagatgaaaatagggccttcttggggaaggtgacagttgactgttcatactcgggcggtatgtgttagggtccttgaatgtggatgctctaaggagaaaaggtgatttgagcccagagagcctgctgaaatggacatagaattgtgcagagcctccgacagaaaaaaaggcacctggatttcatgtccttttaacgaacattcattcagtgtttactgaagcctaggccaagtgctaggtagtggtggggcatcacaatgaatggtaaagcccctgctctcaaagagttcattggccatgccagcataattgcaaaatggtgacatacctatgacaacagacctgacctgtattctctagttgcagagaggtattaaggattcatctgatgggaagttcaggaaggaatgcttcacaagcagggatgtgaagtcagcacttagcaagcagtgagcgttgggcttttaggagggaggaaacagctcgtatggaagaggagagttattggcttagcaaagacaaatagctttgtggggctagagggtttataggaacagtgtcagatgaagctgaaaagtagattggggtcatgcttttgtttttctttttgttttttgagacggagtcttgctgtgtcccccaggctggagtgcagtggtgtgatcttggctccttgcaaccgctgcctccggggttcaagcgattctccggtttctgcctcctgagtagctgggattataggcatgcgccaccacgcctggctaatttttagatttttagtagagatggggttttgccatgttggccaggctggtctcaaactcctgacctcaggtgatctgcccaccttggcctcccaaagttctgggattacaggcgtgagccatcaccgtgcccagcctggagtcatgcttttttaaaagggccttagaatctcttacacttaattatgtaggccataattatgtaggccatgagaaatgggttgtgtactaaaatgatcagagctgtagtttaggaataatattctggctagtatagagtctatacttatggtagggtgagctttcggtggggctctttaaactgattcaggtaaagagtagaagccagagctagatcagtggagctgggaaagaggagatgagattaaaggatgttaaagagaaatggttagggcctggggcctgaatgtgggaagtgaggagaagactggggcctgaatgttgaaagtgaggagaagactataggctgtattcatccaaagcagaggggcctggtgctatcctgctagaatcagccgatgagcaatagtcagggagaagcagctcagacacactaggttctcagggctgtgtagacttaaccagacccctgaagagcagaatcttagattctcccagcaatcctaaaggaagccaactccttggtacaaccagagctggaggtggaagcagtataaattagagcaaaacatataagcctgagctgggtgagggtttagaggatgtacctacagactgagaaggagaaggagggtagcagagtagagctttaaagccatgccaagctcccaggaccacagaagactggtgaccccagatttcttcgaagttcactggtttcctttgcctcagtcactgggccatcaaggatgaggttaaaaacaaaacaaaacaaaaaaccactaggaaaaatgactacagagagaacagaggctgacacccgggagtctcatcactatggagaacttattttcatttctctcttggggagttgctgcataaaattaacccagtcaaacagctagataacatgctttttccattttggtatggccaaggacttgtgagttctagaaaattgtaccaaaagagaggataggagatggatgttttaaaatggcttttgaaaggataaatagacattaatttgtttgctttcaccacactttgagcccttcactttcacagaccagtctgatgtgaccccagccattacccacatagccctcctttctgcatggcttccctgaccctgccatgtcgatcaagtccagagggatgttaataagctgaattgtgtatggaactgcagtttatgtgaccatgtaatcacctcacttctgtgaaaaataaggataatgaaaagaagccaagttctttctcaaccttgctacatctcaactttgctgtagactttgacgtttcttaaaatcagcctttccatttataatagatagtgtgctctgctgtcatttgttttaggtttccagccatagttcccaggccaccaaggactctggtgttggccttaagtactcagcctcaactcctgttagaaaaccacgccctgggcagcaggatgggaaggaaggcagtcaacctccccctgcctcaggatactgggtttattctcccatcaggagtgggttacataaactgtttccaagtagaggtaagtcaaatcacataggaaagttgcatttctcttgcccgtttaataaccttttactgattctctgaaacccctaagacacaatccagactccttagctagctccatgaggtcttctgtgatctggtcttggccagcgacctcttgtcgttgttttaaaccctgtctggaatgtccttcctccttcccttcccatggtgatgcctactcatccttcagtgagacctaggtcctcaaacaatgctcctaaatggagccttcttccaccctgcttcacccaggctgactaagcagcctctttgactgtactggagcatggtgtcttgtgtccttgcatcacggcattaatctcatcctcctaaaatgaagtgttacgggtctgtcttccaaagctccagaggaagagtcagacctgagtaaatctttttcacttattagctgtgtggtcttaggctaattatttagctgctgtgaaactgttaatctgtaaaatgtgaatactaccttctgagaatttgttcattcagaaacgttttttttgttttttgttttttttttgagagggagtctcgctctgtcacccaggctagagtgcagtggcacaatcttggcttactgcaacctccgcctcctggaatcaagcaattctctctcctgtttcagcctcccgagtagctgggattacaggcgtgcaccaccatgcctggctaatttttatatttttagtagagatgagggtttcaccatattagacaggctggtctcgaactcctgacctcaagtgatctgcctgcctcggcctcccaaagtgctgggattacaggcgtgagccaccgtatgtgtccaggaagtgcttattgactgcctgctgtgtgctaggttctctgttgtcagtgatcagcaaacatatttcctggttttagggcagataagttagtaagctatcacgttggagagtgttacatgtcatgacagtggtaaacactgagtgctgtaagatcttgtatgtagcatgaattagatacccagatggtcacttaataaattaatgaataaattagcaaatgcagaaacaaaccaacagataaacataagaaaaactcaagtatcagccatagaaaatactttgaatccatgttttgagctgcttttcaaaaatagttttgacctttttttcagagttttattctcacatctgcagtatcttggcttaaatgctgctgttctctactaaatttgtttacctggtaaaccatgggggtaaaacactcttttgttgaataaactcttctgtttatttctttgaagatgcagacagtggaggagatagtcaggaagagagtgagctggatgaccaagaagaacccccatttgtgcctcctcctggatacatgatgtatactgtgcttcctgatggttctcctgtaccccagggcatggccctgtatgcaccacctcctcccttgccaaacaatagccgacctctcacccctggcactgttgtttatggcccacctcctgctggggcccccatggtgtatgggcctccaccccccaacttctccatccccttcatccctatgggtgtgctgcattgcaacgtccctgaacaccataacttagtaagtggaaagacatacaactctctttccacactgcttccatgggtgactgataaggttatatacttaatgagttgacctatttatgactggattatatggcaaagtgtgtttgtaaggctgatgtttagaactgtgcaagcattctcttattaaaattctcttataaaagcagtggcatgtgcctataatccgagctactcaggagactgagacaagaggattgcttgagcctaggaattcaaggccagccccggtaacagcaaaaaacaaaaaccaaaaaaacaaaaataccatgtacaggagttagggtctcaggccagtctacaaacctgggttagccatttaataacaaatgttttcagtccagaaatttaccgtttttacaaagcttatgtatttttctattgacaagtgttatattaatgtgtatgtatatattcacttactagtgcctgtacttgtacacatacatatatgtataatatgagtgtatacacatgtatgtgcacgtgtatgcacacaggtatggacagcatacagtaaggttttggtggggattatctctaggtaggatttatttattatttattttcatagtttatatttcggtggggataaggttttggggattatctctaggtggtgggatttatttattattttcatagtttatattttattgtacacaatattttgtattctgtttttcctacttaatgttataagcatttgtccatggttttacaaatgtctttaaacaatattttaatgactgtacaacatttctatatttgtaggtactgtagctgactgtaaattcttactgtatctcttaggctagattctaagaaataattatttcctaattactagattacttcctttttcttttttcttcttctttttttttttttttttttttgagacggacttgttctctttcgcccaggctggagtgcggtggcgtgatcttggctcactgcaacctccgcctcccgggttcaggcaattctcctgcctcagcctcccaagtagctgggattagaggcatacgccaccacgcctggctaatttttatatttttagtatagatgggggtttcaccatgttggccaggctggtctcgaactcctgaccttgagtgatcgcctgcctggacctcccaaagtgctgggattacaggcatgagtcactgcgcccagcctcattagattactttctgactttttggttctaaagaaataaaatggaatctaagctcctccttcagactcagaacacctggagttttttccttcctgtcttggcagattgagtggaagataaactagggcacatgtcaagtcaccagtcccattgtaataggtcagactagttttagagggtctgtgtgcatttacaagtttaactgtagtagtcactcacattcttttgcagtttttcttgcacattgtaatttgtaacaatttctttctattcagcatttttctataatctcttaaacgggttcttttactctccaaacttacctggctgtttatgtagtttctcaggtgcacttttatacttcccttcgtttgcatgtgttacttcttcagcctaggtctttccccttccgttcgttcttcaaaacccaggcaaaacacctcttcctctgagcagccttctcagaacttttctcccatgtggccagaggaaggagagacttctgtctatctcttctgctagaccccgaactctttggaggcagaggttatccacaagaggcttggcaaatgtttctcagtcatagttggactgtttgaaaaattaaaggttctatttgtctgtcagtttcatccgtgacatttaactttttataccaaagtcttagaatctaccatcattttttgggccattgataccactttaaccacagttaatttcagcttttggcaggaaagagaggaaacatcctgtgatgtttcagcactgcatttttttccccatctcattcaggagaatgaagtttctagattagaagacataatgcagcatttaaaatcaaagaagcgggaagaaaggtggatgagagcatccaagcggcagtcggagaaagaaatggaagaactgcatcataatattgatgatcttttgcaagagaagaaaagcttagagtgtgaagtagaagaattacatagaactgtccagaaacgtcaacagcaaaagtaattaatatattttttataattcagacaaatacgatattagttcattaatgctgtcgaacagaactttctataatcttggaatgttcttgatcttctgtccaaaacagtaaccactagctcagtgtggctgttgagcacttgaaatgtggctgatggagctgaggaacagaatttaatttcaattaatttaatagccacatattgagtaccatattgagcaatacaggtctgagttcttttggccaataatacaaatcagctcttattgtagtccctcttggagagtggtataaccatttcccctctccagttaccctagctaaaaatacagcaggggttctcaactctttcttttccattactctcctgtgcttccagttggtctctaaatcctgctgactgcatccagagagctctcaaactggtccctttctgtcatctccccttctctagcttttaattagtctcatcctagcgattgtaatagtttccacactggccttccatgtcttctctcttggtctacgctgtatcttgacacactgcaaatctgactgttccactttcccatgtgattctcagtcccatcagaatatacacgacccttctccatctgaaatccacccgtctttttcttttatcacagtatttggtctggctcactactttcctgtggtttcctcaaacaccacgttttctcctgcctctacacctttgcatgtactgtcttctccctgctgacccccttacctaactccaacttgtcttcaaaataaaggtcagagatcccctctcttttttttctcattaaaagcctatttcttctcaggtgcccacaattcaaggttagcaaccttggtcatagcactgttcacacaatgttctggggagcccaggagctccttgaaggcagtagctggacctccatctctgtgtcccagcacctgtcatagggtcacttagtgaatgcagcatctgttgattgggttaattatgcaaaagcctatcttttgcagtagtccatgaattatgacagttccccagtttttgtcatttaacccagactggcccagaccccagggtggtagggaggcctgcagaggacacaagtaagtaagacgtggtcactgccatctagcagcagacatctgactaatagtcctggcaagtgaaagcaagggccacacctaaaagataggggctagatgtttgaaggttaggcagatggttatgtctgttatttttgtgggtatacacattggggaatggaatttttttactttgaggtattttggagggagatgatagggtggtaggattgccacttcttttcatagttataaaagtgtaataaatactattctaggaagtttggataacacaaaaatgtcccaagaagaaagtaaaaatcatatgtatgccttcatttaaagataatctgttaaatgttgaatttattttcatatttttctgtcatgcagtcatacatagctaatctaattttcaaataatttcatcatgttagccttaagatattgaattgtgtgtcacagtttttgatgtgtcaaatgttgtcaccagagttttacttcagccgaatggaataaatcacaaaatcaggtagtcttcaagggcagcctatgaactgcccttgaaggatagttttgagggaatggatgaatattgtggtagtggtttgctttatttttatacctcaaaagaatagaagtatcaacattttcttggtcaagtgctgacaacacaataatctttgttgttatatttaaaagggcaaacaattccatgtcatgcattttacatattatgcatttattgccaataggaattccatgtttaataagatggtaaacctagaccttgaacaaaatcaaatgtagcagtctttcttacctattctcatataaaattagaaaatcattgtagatctttttagtagttaggctacaagtatctgtattgtctacatttaacattttttaatgggtgtatatattattttttagggacttcattgatggaaatgtagagagtcttatgactgaactagaaatagaaaaatcactcaaacatcatgaagatattgtagatgaaattgagtgcattgagaagactcttctgaaacgtcgctcagagctcagggaagctgaccgactcctggcagaggctgagagtgaactttcatgcactaaagaaaaggtttgtcttcttgtggtttggggtgtgagctcagtgtgggtgagtcagcttactgtccacctgaaggattagaaagagaatgtgtgtgataagaggacagttgtccaagtcagacagccaggttccaggctggactctgctagttaagaagatgtgagaatttgtgcaagtcatataagtcccctggctttgcttttcttatctataaattcaggctaagaatacgtaggcttttcggcatggattaaataaaacagcgtatttaaaattcctgaagttacttagttcctagcacaccccacgtccttatcctgtgtgtatcttttatatttaattatttgggttctgctacctgtgtttttttaaataggtcaatctttatattcttattaagctacaatggacctcacaagtattactttggtcttcaggttgataatgatacaaaatattttttggtcagagataattttcttttttttgtttgagatggtgtctcgctctgtcacccaggctggagtggagtggcgcaatcttggctcactgcaacctccgcctcccgggttcaagcgattctcctgcctcagcctcctgagtagagacggggtttcaccatgttggtcaggctggttttgaactcctaaccttgtgatcctgcctcagcttcccaaagttctgggattacaggcgtgagccactgcgcctggcccgataatattctttagaccacaacacagagggaagttggggagaaaaaggagttaccttttattgagccactgctgtggctacacatggccattttgtaaatgtttcatttaaccttcctggcagccctgtgtagatgatgttagcttggtttactgatgtagctcagagaggctcattactggcccagagtcacatagccaagggctcttttagttagatgagaattccaggatgaaaagagttccttacccacatgaaacacctcaggaactattatttgtattttgctatttcaacatgaatctatttaaattaaaagcagtctattacctaggaactaaattatttattaaagaaattctgtgagtaattaagaatggaaaaagtccttttcagatgagctgttccttctgttgtcatatgttggattactgtgagagaaaatagatgtgagcagaactagaggaaaaaaaatcactggtataataatatataataagatattttgataatatatcaaaatatcactggtatattttgattataaattttggtatattttggttatatattaatatatataggtatagatatataaaatcatcaaaagaaaattgatggcagtggtagtaggcagaggtagtaagtcaaccaaggctggtaagttctttcaccttcatcctcccaaaatgactcagggaggcagcttggtaagaaggaggaggagagagaaagtagtggtgttttggaaggagtgtgccagacatgttaaaacctgacatagaaggagacaaaaaactatttggtggcttttctggaatgcatagccagttttatccagtgctttgctggtgaaactgacagaaacaagctatctgaaatggaaagacgtatggtaaaatatgtagctctctgggagcttgccaacccttttgcatccacacagatatttaataggcaaatttaacatacggactcctctggctttagtacaatggcagacttcagttttttttggctgaaggtgagtcactgctcaaccaagtgcaaaccacactctatttatttttggaacttttgatgtcattgttttaagcatcttatgttaggcagaaaaagaaaccaagttgattaaaaaaaaatgtgtttttaccaaatcttatataggaagattttaaacatttgcaaagtatttaatgtttgtgtttgtcagccgtaattacattatcaccagatcaatgcatttttacttcgcttgataataactatagagtgcagcaagaatttctgtgtggaggaaatcttggtaaaatcacttccttcccacttagttgggtagatagttttaatatttaaaatgatataatagtattacagattattttgaaataaaaagcatctttagttccactactttcaaatgactgtatttatttttatatagtctttctgtctttgttgacacatgtagttttacacagttgctctcacagtgcttataccattttaaatttatttttctcagccaacataatattaacattcttccgtgttgctacattgtcatctgatcatttgaaaggctacacagtattccactttgttaatgcattatcacttagcctattattatttgtcaggtcttatattattatacattgagcatttttatatagtagttctttgcttctgaattatttaccgagaattagagttacagtgaatggacatttttatgtctttctgtaccatcttgttttccaaaagagctgtactggtttacatggccagtagctgtgagtgagtattgtaactgaatggcttttaatgacagtttcttttctagacaaaaaatgctgttgaaaagttcactgatgccaagagaagtttattgcaaactgagtcagatgctgaggaattagaaaggagagctcaggaaactgctgttaacctcgtcaaagctgatcagcagctaaggtaggtggattccctaagccgttgatgtatacattgagatgaatgaaaagtttgcttctaaggggataataattggtttatgataaataatgcatggtaagtctacaggacctggggggaataaagcaatgtgctttagatcgctccaggctgatgcaaaggatttggagcagcacaaaatcaagcaagaagaaatcttgaaagaaataaacaaaattgtagcagcaaaagactcagacttccaatgtttaagcaagaagaaggaaaaactgacagaagagtaagtaaggcctctgtagggctacaaggggtttgtgctggaagacagctctggggttccgagtcccttaggatctgctctagtgttgctggtgctttgtaggcttcagaaactacagaaagacatagagatggcagaacgcaatgaggatcaccacctgcaggtccttaaagaatctgaggtgcttcttcaggccaaaagagccgagctggaaaagctgaaaagccaggtatggcaatagacaccttgaaaaaacaactgacacagcactttatgattataaaagtaatacatgtttaattgtagaaaagaataaatgcggctatgtattatagttgttaagcatgaagtctgaactaaatttgaatcccaactcaatacaatacttctgaataaaaaaagtgagtctcaaaacatggtatactctatgagatcatttctgttaaatgcctttatcaacacttatggttgtatttttagtcaataccaaagtacaaaagtggtcatctgataaggggggattttgagtattttctgttgtcttccttttgcatatctgcatggtcttcttttttttttgtaaacaaatacgtattgtctttaaaattgcaacgaatttttaattttaaaaatgaatacattttaaaaatctctgactaacttccatcaccaaggatgtcaaaatggaattagggtataaaaataaaagttcttggaaaactgtaacctgagggatgatcatgattatcatattgttgttcttactgtgatcactgtgatttgagtggttttaagtatgtgagctcaaggttttcattaggcatttcacccttgcactccttgcctggcttttctgactcttgggggctaggatattagctcctgattttacctcacaactaaattatctccaggttagcactgagggctgtatggcctttgtcaaacttactcttcccttttctttaatacaggtgacaagtcagcagcaggagatggctgtcttggacaggcagttagggcataaaaaggaggagctgcatctactccaaggaagcatggtccaggcaaaagctgacctccaggaagctctgagactgggagagactgaagtaactgagaagtgcaatcacattagggtgtgttttttattagggttttctgaagagtcgtaggacagtgctataggtttactttgatgtattttcattgcttctccccaaatgaaaatataaattcctgaaatcttgcctcctctgtaaaatcagtttggtgttgttacatatccatgcagtggctgtcatgtgtagttccccctctgttgttttctggatatgctcaaagttctcctgcccctgtacctttctcataccatttcttctccaggaattccctttctcccctatcactagccagatcccacctgtttctcatggcgcagcttcatgccacctcctcttagaaaacttctggccgggtacagtggctcacatctgtaatcccagcactttgggaggccaaggcaggcagatcacgaggttaagagattgagaccatcctggccaacatggtgaaaccccatctctactaaaaatacaaaaattagccaggcatggtggcatgcgcctgtaatcctagctactcgggagactgagataggagaattgcttgaaattgggaggtggttggttgcagtgagccgagattgcaccacggcactcttgaacccgggaggcggaggttgcagtgagccgagatcgtgccactgcaccctggctggtgacagagtgagactcaatttcaaaaaaaaaaaaaaagaaaacttctctgacctttttctttcttctggaagaaggagtttccttcttttgagtttagaaacactctatctgcatgtttcctagggcatgaaggcctagccttttgtgatcatgtttatcttccctgccttaccactcaacaaggtactaagcccctccagagcaggagccatgtctcagtcaggcttttctctctatagacgttgccttgcttacagtaatgttgcaaatatatttagatgaagagaatatgttactttcttctattatatagaaataggtttctgtaaaatataatgctgttcttgacataaaaggcaaaaatgagcttgtttccaaattagaatttctatgatataaaacaataaataacagaacttattttgaagtaattttcatttacagtcacaggagggaataactttttttttttcaaacacaggaagtaaaatctcttctggaagaactgagttttcagaaaggagaactaaatgttcagattagtgaaagaaaaactcaacttacacttataaagcaggaaattgaaaaagaggaagaaaatcttcaggttgttttaaggcagatgtctaaacataaaaccggtaagtttaaaggaaaacaatcatacaaagtttgaggttggaaatgtctgtattacaagtcacagaaaaaataacaaatggccaaaaaaactttaaagtttaaccttactgctaataagcaaagcaagcaggttataaaaggaatatgatgttattttctgccattttaattgataaactttatttaaaagcaaaataatcatgctcattgctgatcagagtgtgctgaaagaagagcactcacagtctatcaattgaggtataaactggaacaatctcccagtgtttcaaggctcttaaaattcacacctgttgaactagtcagcccatttctactcctccagaaagggcaagtatgtacatcgcagcaatatttataatgacaaaatttggaaacaggctgggtgtggtggttcatgcctataatcccagctctttgggaggctgaggctagaggattgcttgagcccaggagttcaaaactacctgggcaatgtatgagaccccatctctacaaaaatattcaaaaattagcgatgcacattgatgtgcacctatagtcccagctattcagaaggccaagcagggaggatcccttgagctcaggagatcaaggctgcagtgagctatgattatgccactatgcttcagcctgggaaacagaggaagaccctgttccaccacaccccccaaaaaattggaaacagatgaccaatttaaaagccatatttttaacctttaatgacatgcaaacatgaccatgagaagaatgaaaaaaagtaggtaaaaaatgaatatggagtatagtcccagtttattttaaaatgtgtgagagtgtgtgtgtgtgcgcgcgtgctcacgcgcacacacatgcattcttagaaggaaatacatcaaaatgctattgtaaaagtgatttggggtggtgaaataatggtgggttttcatttttttctcttatgctttttttttgtattttccagcttttctacagtaagcaagtatctctatgatcagaaaaaaagttaatatttaaatatctgtatttcaaaggccaaaaaattgttatataaatctcagtctgtatttcaaagtatttttaatttattttgatcaattttatataaaatgcttttagttgattcttttatgtagaagcaaatgctttggaaccagatctttgttaattaaatgtttttgttaaaatgtttgtctgtttatttatttatatagagatgggatcttgctctgtcaaccaggctagtctcaaacccctgggctcaagcagtccttacacctcagcctgccaaatggctgggattacaggtgcgtgctgctgcacctggcttgttaaaatgtttttaacaaattaaatagtatttagcgatacttttagagaattttttattaaaaataaaattagcaccattaattcagctcaacaaaatttttaaaattgtcttgtattagtcaatagcattgttttctgtttcattttgtaaatgttttccaagttcatttaatatcatggaccatgctttgtttctatcccttagaactaaagaatattctggacatgttgcaacttgaaaaccatgagctacaaggtttgaagctacaacatgaccaaagggtatctgaattagagaagactcaggtggcagtgctagaggtaatgaacaaagccagtgtacccttaagaaactgaagtctttctcatttaagatgtttgagtcctcttttatctgatttaggagaaactggagttagagaatttgcagcagatatcccagcagcagaaaggggaaatagagtggcagaagcagctccttgagagggataaacgagaaatagaacgaatgactgctgagtcccgagctttacaatcgtgtgttgagtgtttgagcaaagaaaaggaagatctccaagagaaatgtgacatttgggaaaaaaagttggcacaaaccaaaaggtgagagcaagaacaaataagcttgcaggatcacttcttcaggccaaagcattataaacacactataaaaaatttggaaaatagagaaaaagataaaatacaccacaaacttggtatcataatacattttgccagttgcatttttttggagaatttccttctagctttttttttttttgctcaaaagcatttttttaaaatctattttgttttttttaagtaaaatgatacatgctggaaataaatggagatatatatcttgttcatggaccaaaagacaacattgttaaagatttagttctgttcaaattgatctctagattcaaaacagttaacaattaaaatctcaatagcctttccttgtggaaattgacaagctggttctaaaattatatgaacctagaatcgaattattctaagacctagaatagaatttatacaattttttaggtatgacaccaaaacaacttttagaaagtagaacaaaaatttaggactaacactacctgatttgtaacacttttataaacctgtagtaatcaaaacactgtggtattagtgtaaagataaacacatagatcaatggaacagaatagaaagtctagaaataaactgacatatatgtgaacaactgattttgataaagatacaaaggcatctttttcagtagagaaaagatggtcttttagaaaaatgttggctgaaacaattggatatacaaaaccaaaaaaagaatctcaattcatacctcactatgtataatatataaatatgaatttaaaatgaggccaggcacgttggctcatgccagtaatcccagcattttgggaggccgaggcaggaggatcacttgagcccaggagtttgagaccagcctaggcaacatagaaagaccctgtctctgccaaaaaaaaaaaaataataataaaaatagccaggttgggaagctgaggtgggagaattgtttgagccagggagattgaggctgcagtgagccataatgataccattgcactccagccagggtgacagagtgagaccctgtttcaaaaaaaatatatatatatatatacatatttattttatatttatatataggaccataaacatatatgtaaaacctaaatataaaacttctagaagaaaacataaaacatagcagaaaacttttgtgaccttggagtgggcaaaaattcttggtatgacaccaaaagcatgatccataaaataataaattgataaaattagacttcaaaatttaaaacatctcctcaaaagacacaaggtaatgaaaagatatgtcacaggttgggaaaaaaatatttgcaacccatgtatctgataaaggacttgtattcagaatacatgtataaagaactctcaaaactcaataagaagacaacccagttatttaaatgggcaaaagatttgaatagacatttcattacagaagataaatggatggcaaataaacacatgaaaagatacgcaggataattaatcattagagaaatgcaaattaaaaccacagtgagatatcactacacacctattagaacaacagccataccaaatgttaatattaaccaggaacttttttttttttttttttgagatggagcctcgctctgttgcccaggctggagtgcagtggcgctatcttggctcactgcaagctccaccttccgggttcacggcattctcctgcctcagcctcttgagtagctgggactacaggcacccgtcaccacgcctggctaattttttgtatttttagtagagacggggtttcaccatgttagccaggatggtctccatcccctgacctcgtgatccacctgccttggcctcccaaagtgctgggattgcaggcatgagccaccgcatctggccggaactttcatatatgattgaggggcatgtaaaatggtattaagtaactgttaaactttggaagacagtttaacagttacttaaaaatcaaacatacgccaatcggaagatctagccattccactcctaggtattatatttattcaagagaaatgaaagcatatttctacacagtatatatgctaatgttcatgacagccttatttgtaatagccaaaaactagaaatgacccaaattgtctatcacctggtaaatagataaacaaattgtggtatatccacactgtagaatactactcagcaataagaagggaatgaagtattgatatacacaacatggatgaatctcaaagtaactacgttgagtgaaagaagccagaccaaaagcaagtccacactgtatgactccctttatgtactacaatacatgctcatgcatgtctgctatatggacagatcctactgtacacacaattgttttctactctctcgattgtcacagctccatttttatcagatttttggaattctgaatgttatccatgtttttaatccatgatttttataaaacttcaatttagtgagtcagtttttgaaaaaagtctccacttagaaagctgataataagattctgaaaatgagttgagtcttaaattttgtgaagatttataatcatttatactttccataactgtatgttgtgaaaggataacactgttcctcagtcatctcctgtgtgtgcttgtatatttgacagtctgacttactctctgtggtagggttttagcagcagcagaagaaaatagcaaaatggagcaatcaaacttagaaaagttggaattgaatgtcagaaaactgcagcaggaactagaccaactaaacagagacaagttgtcactgcataacgacatttcagcaatgcaacagcagctccaaggtataaggcagcaaaacagtgaaagtgtgtgatttccttgcccttcgttagattctttgatttttcttacgacaagtaattcctgctaatgagcatggagtttctttctaaaattagattgtggtaatgtttgcacaacttggaatatactaaaagcctttgaattgtacactttaaataggacatgatatgtgaattttatctcaataaagtcagttaaaaaaaaaacctaattcatgttccttagagaacaattttaaaacagcaaaaagaaataaaaattgctgttgacctcactcctcatagattcctagtaacagtttggtgaatatccttccagatttttcctaggggtgtgtctagtttgaaaaacaaaaacaaagatgtaaataatgaagattttaaaattaccaaatgtttataaatatgataatttatttagaagaaattgctgagtaattctagctaataatatacttgttgaacattttttatatccttggtatttcattttctcacttaatcctcataacatttttatgagataaaaattattttactcatttgtaaataaggaaactgaagcttagttttcttgtgactgcttaaatgagaagtgacttgctagaggtcacacagctagtaattgacaaagccaatatagataaaaaatttattcccaaattgccttcctgaaaggttaagtttctatttctaccagcaatgcagaaggtagctgtttttaaacacctaacattaagtattatctgtaattttttcgttgtgagattttgaacatgaaaatctttaaaaacctgagctccaagcccaaatctggattgtgcatgtaactctcttttggcctttaatgagatagtgtggcatagtcatacatgtaacaggagtaagcttaaaacaacttctctactttttgggaatgctaatgggaatctgtacagtaaatacgtatgtatttcttatttcatgagaatgtcatttctttagaaaaacgagaagcagtaaactcactgcaggaggaactagctaatgtccaagaccatttgaacctagcaaaacaggtaaggttaacaaatgtaatattctagcagtatactgagggtatgcagaccattggtttaaataacaaagaaatcaagtaggctggttcctcttcacaacagcagataccatagggccatttatgtaacataaccatcacataaataaaagttttgatggagagcagtggtttgctaatttattttagccttagaactcttgatacaaacagttttactcaaagctagtaagtagggtggtggctagaccagagcccagcagcagtctctcagcagcccttcttggggtttcagggaccagatgggccatctctcatccatgacacagatgaggcctctaaaggctgggcttagatttgattactccttgagccatagagtacccgccaaatctgggcctctatcttgtcagatattgaatatagcagatttttgaccctcatacttctaatgattttcttaaaggtaattcagtgttgtcctgtgagactagtgctgtaattcaaagcacttcaaacaagttctagacttcagtttctattatgtaaattaagagttatgccaggtgcagtggctcacacctgtaatcccagcactttgggaggccaaggcgggcagatcacctgaagtcgggagttcaagaccagcctgaccaacatggagaaaccccatctctactaaaaatacaaaattagccaggcgtggtggcacatgcctgtaatcccagctactcgggaggctgaggcaggagaatcgcttgaacccgagaggcggaggttgccgtgagctgagattgcaccattgtactccagcctgggcaacaagagtgaagctctgtctcaaaaaaaaaaaaaagttaacattagacacaggccatcccagcactttgggaggccaaggcaggtggatcacttgagcccaggagttcgagatcagcctggccaacatggtgaaaccccgtctctacgaaaaagacaaaaaattagctgggtatggtggcatgtgcctgtagtcccagctactcgagaggctgagacgggaggattgcttgaacctgggaggcagaggttgcagtgagccgagatcatgccactgcactccagccttggcaacagagcaagactgtcaaaaaaaaaaaaagttggattagacatctaaattctcttgtacctgtaagtttattgagataataaaggaaataaacttttatgcctctcgttctgtcagacttagtagatactggattggcactgaccacctctagtaaagatggctttattagtagtttccacttgttctttcacctaaaggacctgcttcacaccaccaagcatcaggatgtgttgctcagtgagcagacccgactccagaaggacatcagtgaatgggcaaataggtttgaagactgtcagaaagaagaggagacaaaacaacaacaacttcaagtgcttcagaatgagattgaagaaaacaagctcaaactagtccaacaagaaatggtactacacatttatgattttacataaaaaaagcattttgtggctcatgtgagcctatttttcccctggcagaaagctgctgagaaatatccccaatgggactatgtgtcccttaactgccctgtgtagccatgggtggcatttataccaactgtgtgactctcttacagacctttaacgatcatagaacatcagtcctgtaaagatacttaacagccacgtgccatttgctgcttgaatcccctcctcacatgctggccagatagcttcccaagccctcttgatcacctctgtaatggaattgtccctgtgggctgtcttctactttcttttgacctggcatctgtctcatgtccatgcaggttctctgggacactatttgttgtttaatgactaatcaagattattctttattaagatgtttcagagactccagaaagagagagaaagtgaagaaagcaaattagaaaccagtaaagtgacactgaaggagcaacagcaccagctggaaaaggaattaacagaccagaaaagcaaactggaccaagtgctctcaaaggtgctggcagctgaagagcgtgttaggactctgcaggaagaggagaggtggtgtgagagcctggagaagacactctcccaaactagtatgtattctggaacttctcactgggagatggggtatggattggctctgctggttgtcttgcaaaagtatttaaagagatccggaccccagccagagcccaggagaggaggcaggagaagtaaagcaggaggtatgatagccctgtgaaagatgaggaagcaggttcagaggagatacaatcctgagactgaccagcaagtccttccttgctcatattgtctcctttgagaatgccatctcaagaaagtggaacattcacgtgaataattgccaaaagatactcttaaagtatattacctatgagctttgggaataatgatctacttcatctcaagtgtcaaaaaaatcatattaacagttcttctgtccagatttggcatagtgaatggtaccagaatacaggtgtttgcttttaggtcagtttgttctctcttgaaccatatataaatgaagttgacgtgggaatccagggtaaatgattgttctcacatcagtaaatggtttttctctttcttaggctccagggtttaataatgcttggaaaatgttgtgggcttggggatctgaaagggttgttattcctttttccctgggaactcttgatatacccagacccaatcatttcattatgaaaatgaaacttaaaaaaatatgtcgagttctgatcatgccagagttgttgaaaagtaaaatctgggcagggtgctcctctagggtgataagaaaaatattttttaaatgtcacttttatttcgtaagcattatctgtcgagtactcactatgtaccaggcgtttgcacacattattccaattgaacatcaggaaatgttttcctcttctataaaatggggctcatgccagtgtaggagccagctccaaatcctgtgcactttccactgcactgcctcctgtggaaggaagtagtactggtgtgtctccctttatgaaaatcaatgtttataaaaaacatttcagctgttccacacacttcaggattggtgctgggtttcctctcactggtctcaaagacttgaaagagaagatagtagctatctgtcactctgggatcaggccctccaggaaccaattacttcaaaaggcacccttatctgggttttttctgggcctttggtgtgggtcagggtaggcttgtacgactttgtaatggaggaaagcacctgcatgggtagcatatcaccattatgcatctgccacaagggaaggggagctctgcccacagctggctcggggtctttggctaaacctactgaaaatgctcatttcagaacggcagctttcagaaagggagcagcaattggtggagaaatcaggtgagctgttggccctccagaaagaggcagattctatgagggcagacttcagccttctgcggaaccagttcttgacagaaagaaagaaagctgagaagcaggtggccagcctgaaggaagcacttaagatccagcggagccagctggagaaaaaccttcttgtgagtacctgctgccgtggcagtttgtgaggaaatgataaatttaaaattttaaactgcaacaccacttcaacacagagaaaataaattacccatcaacccagtcctgaacccagctgttgttattgatgtatttatgcatcatttgtccttgaagttgatggtaagttttacctgggacgggtgcagcctcaatggagctctggctggctggggagactgttggtgtgaacagccattatcagcacaaagtagacagcatgttctgccagcaagcctcagtttacacctccactggcagggaggagggggtgttgaagaagccttctctagacggttgttttttaagatggcatcttgctttgtctcccatgctagattgagtggcgcaatctcagctcactgcagcctctgcttcctgggttcaagcgattctcatgcctcagcctcctgagtagctgggactacaggtgtgcgccaccacgcccgactaatttttgtatttttagtagagatggggtttcaccaggttgaccaggctagtcctgaactcctgacctcaggtgatccacctgcctcagcctcccaaggtgctgggattacaggcatgagctaccgtgcctggcttatagagagtttatttttatttttattttcaagacagagttttgctctgtcgcccagtctggagtgcagtggcatgatctcagttcactgcaacctccacctcccaggttcaagcaattctcctgtctcagcctcctgagtatctggaattacaggcgtgtgccaccatgcctggataatttttgtatttttagtagagacggggttcaccatgttggccaggctggtcttgcactcctgaccttgtgatccacacgacttggcctcccaaagtgctgggattacaggcataagccaccgcgcctagccagttttattacactgctgtagtcagtgcctacaaatttttctcatcctgccctttttggccaacattagctttaatcattatcctaaaaccaggaagctcaatctaccatgctttcatccttgaaataaatttgggaagtgacactcaggtcagaataatttatggtggatggagacaggtgagcagcaatggaactgtcaagggggaggatttttccactaccctctggaggggttagtggagccctgttgtatgaaaggaacttttaaaccatgtgtgtctctcaaaggggatacgctgataactagtgataggcagatcgtcataaagatggaatatagatgtctaaaatttaatcctaccagtaaccctgtgatgatgggtattattattctcattttacagacaattaatgaagactcagaaagggatagtagcttattatcaaaggtaatgctaacagactctgacgtgtatatacgcccagctgtatttgatctgcccatgaaaggccgatagaattatccccatttgacagctagagaagctgaggcccagaaggggaatgaagttatagagctagtgagtgtgtaagccagcaaaccacacctccatgtgttagatcgcagagttattttcttcctcctgtgctaggagcaaaaacaggagaacagctgcatacaaaaggaaatggcaacaattgaactggtagcccaggacaaccatgagcgggccaggcgcctgatgaaggagctcaaccagatgcagtatgagtacacggagctcaagaaacaggtgtgtgcccagaaagcccagctggccagcctggggagagaggactcactgggctcaggcagattgtattgtttttaatatcccttctatagtagtatagaaaagctgattataagaatgttctttaagtcaaatctggttttttagccttaaaatttagaaacacaccttgactattaaaaatataaatttctcttaaatttgacaagctcttaaaatgttagtttttcaaggaaaaaaggtaattcttgagcatcatatttcatgtcccaaagaactatgttgaaatgctagattttatgccataaacaagtctataggagccaaaacctcccctaccccttgagcaagaaaagatggtccgggggaaacctttgatatcacataatgtagccaggcagagagtattaaaccagttcatgcctggactggtagagtctctaatccttgatatctctggtgtcctttagagcatctgggccatccctgaactctagtcgggctgctgtagccactcatttggccctgctatacttagtcttttgggtgaccccacgtggccattctagtttcatctgtgcttccaatcccctgatgccccacatatacccaccatttaattcaagaaaaaataaccaaaaaaaaattatttaaagaccacaagcccttagtgattttgcctttgcaaatttggtaaggcaattagcagtaggtataaatttcatatttcactaagctctatatggggtagagccacatagagtagtctcaggcatcaaatgcagttggtaacactttaagaaacctctaggctgggtgcggtgctgcattcctgtaatcccagcactttaggaggccaagataggtggatcgcttgagctcaggagttcaagaccagcctgggaaacatgccgagaccccgtctctactaaaaatacaaaaagtagctaggtgtggtggtgtacacctgtagtcccagctattcgggaggctgaggggggaggattgcttgagcctgggaggttgagactgcagtgagccaagattgtgccaccgccctccagcctgggtgacagagcaagaccctgtctttaaaaaaacaaaacaaaacaaaaatgtatattgccaagccaccagattcttcacttataaaattccagcattagcatttataatccagatcacttatgacttatttcagtaaatggcccttttctcatttgtggcttatttactctagttgccagttgggtgccactgaggtgcttcatgtaaattctcacttagtttttacatttctgagcagaaggtatttatctccatgtataaatgaggtaatggaggatcagatgttagccaacttgccctgtcatactggtaatactggaaatcagattggtaactagctttgtctgactccaaagagattgtcttctatagagtaattcaccttcaaggaactttatgcacatggcttttctaaatgaaagttgttccagttaaaatgccaataaaataatttattcagtagcttatagagtcttgagtatctgaaaaatcacaagtttttacagttctagtaatcatagtagttgatatttatagatctttaaatacatggcacatcatacagctcaattccaagtaagtctgaaattttatacaatgatatttgacaccaactcactgtttagatggcaaaccaaaaagatttggagagaagacaaatggaaatcagtgatgcaatgaggacacttaaatctgaggtgaaggatgaaatcagaaccagcttgaagaatcttaatcagtttcttccagaactaccagcagatctagaagctattttggaaagaaacgaaaacctagaaggagaattggaaagcttgaaagagaaccttccatttaccatgaatgagggaccttttgaagaaaaactgaacttttcccaagttcacataatggtaagggtttatcctgctattctctgggttcgtaggattgaccacctcccccagctaagctaaaacacagatgtgggggtgctggggtaggggagggaaaggctggttggcttccatttgtagcagcagatgattcatgatatctctattttccctctgagaaaggatgaacactggcgtggagaagcactccgggagaaactgcgtcaccgggaagaccgactcaaggttgccctttaaaacaaacaaaaaatcagtatgagatactgggcacattggggaggggaggggaaagttacatttacctgatgctttcacatccatgctgttgcagccctgccagcagtgtcagggatggcatgtctgaagcttcgaggagttggtgtcacacagtaaatggcaatcagtgttcaaaaccatgacttcttgtgttgactccagtgttctttaacctatgtaatgctgctttacctcagctagaaccgatagaatctaagtatttgggagaggaagtagaaacacagtgatgaactgtaaggttttcataggccagtggtggcaggaaagatttgggatactggaaaagtaggctgaatgtcaggtaaggaattgtttggctcagaacatgttgactttgaaggccttgtgagatatccagggaaggatatctgtctgtaggcagccaaaaataggagtctaggattaccgatcagtgttgacctaaagatttgagagttaagagtataggtgggaggttacatttatgtggggggaatggctatgtagacagcatgggatgagagagtacagtgctatagtattgagtggagccctgtgatgtccaacaatagtctccagccatgtgtggttatttaaattttaataaattataattaagttaaaaattcagttattcatttgccacatttcaagtgcttaatagccacatgtgtctagtggcttctatatttatagccagaggtagaacattcccatcattgcagaaagttctgttggacagcgctgctatagactttgagagaataatttgattatagcaggggcaaaagccaaaaagtagtatgaagttgaggattaaatacctaatcatttatagacaagaaactaagacttaggaaaaaatacataatcaggagacactccagttgtcaagtataaactgatcttctcagtcataacagaaaaggaaaaaagagatgaggcaataatttaatggagaagcaagggatacagaaatcctaagcactgctagcatggaaaaactgggccaagtgaaagaccccgttaatgacaacacagaaaagtaaaggtttatgcacactaagtatccacctggcacctcctacaattctttttaaagatgagcatttttgacagccattcctactgttagccagatttgcctatcaaatgtatgtgaggaagctgagcggcagttctggtacatttcttctgtgtaaaaccctaagtcttatcacacttttcaggcccaactccgacactgtatgtccaagcaagcagaagtattaattaaaggaaagcggcagacagagggcactttacacagtttgaggagacaagtagatgctttaggggaattggtcaccagcacctctgcagattcagcgtcatcacccagtctgtctcagctggagtcttccctcacagaggactctcaacttggacaaaatcaggtaagcagcagctctttttaaaaacaaaacaatagcctgaggttgttttttgtcttttttgagacaaggtcttgccctaccgcccaggctggagtgcactggtaccatcacagctcactgcagccttgacctcccaggctcaagtgatcctcccacctcagcctcccatgtagctgggactacaggcacacaccacttggcttggccactttttaaaattttttgtagagatggaggtcttgctgggttgccagggctggtctcaaactcctgggctcaagcgatcctcctgcctcggcctcccaaaatgctgggattacaggcgtgagccaccacgctgagccaagaggaaactcgtaagataggatttaatatattacatagaaagtacttaaaagccgtggggtgtataatctagaggagattcagaaaaatatagattatgccgccttcaactctctgaaaaacttgtcttagcaaagacttggtagaggtagataagctgatggcttaggaaacagactacgactgcagattggatgacctggcagggatatagttaattctactattcatgtcctccacttctggatttatttatttcctactctgtcaatataaagagcttagacctgtgaggccaatatgagtcctagtttagtatgtctccctgcattttgtaacttacatttacagagttggaattcagacctcttaacctaaggtctataaaaaccctgaatttcacaaaggttttctgtgtgagcttagataaggttaataagcatttaagaggaacatgaaatatactcatggaactggtaagtagtagcacacacaactgtcagagataggtaacagcttccattttccagtgcctattgtgtgcacatacaaaactttatatatatcatctaatttttacatccttggaggtaggacttatccttttatatagataaggaatctgtacaaaatgataaatgatttggtcaaggacatagcaaaggacaacagcaggacttgcgggctaatctatctttaccacagagcagtatattttaatggtggagccacaaggagctttcaaggacagttgcctctttaatgtgcccaaggtgggcaagtgacttacctagttcacacagctaattagcagcagggccattagcagcagggccatctgaatatgattatcttaacaccatctgtggtggacccagtcaggtaaaggccaaaatcatcatgggccttagggcagggttcgaggaggagtgtgagaggcactgggcattgaatagggaagctttggggatgagacagcccagagtagtgagagaagagtagagtgcacaagggcttaaaagccagcttcaattaccagctcaaggtggcagccagagttatttagttgctttaaaggcaaccaacgcacagtgggtaggggcgagattggtagaattatttagaagtctggggttgtaatccaggcctatatgggataaaagcctgaactagttaaaagttagggggctggcttctgagcgtaacattttatttccctttttttctggtaagaacagatactacacttgatcttagtcaaaaggctgagagctccttccagcaagttctgcaaggtccatcagaaccactagacagttactgacactgatgccatccctgctcacaggatagatgttacagattttttttttaaactagaacttttaattggaggatcttgaattttagcagttttaagaataaccgtttaattttttctctcagaattttgtacactggttcatcttaaaacatttttccaaagaggtaactcaaatatgtcatttacctataagccatcatgccatcacttagttaagactgtttttactgtttcaagaatttgatttatccttccttttgtcttactgtaggaaaagaatgcctcagccagatgaggaatactgtcttgtgtaaatatattcaaggaaaacacctccactacctcactgacttcataattggaatgtcacatggtttttttaatcaagatgcagtgaactgagattctgaaactccactgtagtttactttgcctgtaccattaatgccaatgtttttataaatcacttgtacatagtacatatgggaatagttgcatatgggaatttaaaccaacatgtggctgagcctttttttttttaatcttcgtaacatgtttaaaaaaaaacagtgattttaactgcatatttgaacctacaaactggtaaatcttattaacaaaaagaatgtacttaaggccctctttatttatagtgtcgagttatttttgaattttgcttaaaatctatttttcatatgaaaataaaagataacaatcaacttgggtctgtcctctgactttacacttcacaggtcattctatggaaaagccgtcaaatttttaccttattccaagtaagtaatctttcaggtggttttcttttacctggaggctgaagtacattatacttatcaatgaagatttcatcatttggaaatacatcaattataaaactattatgcttcagatgcctttccttagccaacatattctttggtggaaaatcaggaaaactttgtaccttggagaatgtgacccagtgataaattcaaattgtgttgcctttcagattttgaactaccataattaacagctcaactccatgatgtatacatttctttaaaaactagaatagcaactgctctcacagtctggcataattattcccaagggggaaatatgtaataagaagttttaaaatattctcgggaactcttttctagatcactactagacagcttttgagtcacaacaggtatgttaccctgttactaataatacagagcagcacagtgcagtcatccctcaccaccaaggtttttattccaaaacagttatttggctagacgtgaaccgttaagatacgggatcaatggagttacaataaagacaatgaaagtgacaatttattaatacacagtaagttctagaaggcatctttcaaaacaaaacttgatttcttttgtatttacattttttgtttcaagtcttagcaaaatgctaaaaggcctggcctagtcacaattactgacatccttctgggacacaattttctgggcctgtgttgaatgaggataaattatcttttctctaaaatgccacatgaaccctctctatattcccacatgaagaggaatggaaggtaattatttggtcttttcttctgtttaggggaatgaactgaacgactcatttttttaaaatcacacttaaaagacacatgggcaaaaaagttccccaaaactactgtcttaccgaatttgagaagggaggtaatgtatgaagcttaacagctggcttcaaaagacacctttccaaagaaattgtactacctctattaacgtgtaaaccaccaaccaaaaaaaaataataagttactccatcaaacacgttattatccataaaaaagacttcaacattgtagtggaagatctatttaagcataaatagtactaagcaccaattactaatctgagggcctcctcacaggtccaagggcaatgagcaacctcgagaggcaggtgactgcacaagcagtaagctatggattaaaaattaaaaggatttcacattctttccaaagtgtactgcccggtgtctggcacacgcatgttacaatatgacaatctgctctatttgtgagcacctgagtgtattacaggggattacacatgcatatgatagaatctggctcccggtacagtcaaaggagaacagcatcagccaccaaatgtgctgatcttacactgaaaagggttgactgaaaacatttcaagggtaatgtaaacacaagaataaagctgtgggtctattacttagtgatgtggttttatatgctacatacgtagacctctctttatacaatgaatatggacagtgctgcaataaaaactgatgacacgtcaaattgttcacctgaagaaaaaccctattatagttcagaaaataatgcaaccaattttaatttaatctagatacaggtactttatttacaaatatttagattaatagcattttgttacatcaaatgaagagtacagcagtctgaataaatccttcagtcacaaaaacaataaaacccactgtaactaactttgggagtcagggtattgcacctcaacaagccgcagtctttagtttgtgattgctaccttatatcccaatgggtggtttgtttgttttgtttttgtaaatatacacacacaccagcaggtcatggtccctgggtgagtcccttgtgatgcaacagtgtaagcaaaatggatcactgtaagtctttaacagaatataccaatctactccagaaatcttattttttaaaaagttaaacaaagacaaaaataaaaatgaatccacaaattaaccaaagcctactttctgcacattccagttttggcttttatttaacattgactatacaatactctggtactaccacatgtttacaacccagaaagatgtacttttatgttagtgtctgtaaagagggatttaaaatgtgtattttaaacacagcagttgagctgagtgcattttctatagtacgctgaggtgttacctattctatttcaaataaattctcaattcccagccactgaatcataaatgcaataaaaaaaatcaacagaaatgaagaacttaataaaacatgttgtccaaaaaaataagattgtttctcttgctatacagtattaattcagtggccaaaccacctggtgcaaagtaataacttactttgtatcagcacaagcgctgaaacacctttagaaacactttcccttttacaaaacaatttatgccaacatgacataaaacagcccctcacactgtgaacacagggatatcttaagttatttcactgtagggttaaaaatgcacaatttaaaatcccttaacagcagacctgtggttctgactgtccagttcagaatctgaccattccaagaagataaaggtataaaagcttaaaatgtgcaatagtaaacccagccttttttctttttctatacagtaaggcaagaatgcagcctgtaatgcaaaaacgtttacaaaaagagaaaagcaggttagcacattgtcgattgcacaagaacagttaagaaaatcagcaggtaagcaacagtgcaaagatggaacagaatctgctagtgttaatcctctgatgctaggagctctttccagcataatgtccccaaacactgccagcaccaaggggtggagccagtactacttgtgaactgcagttgtgtctatttctttgtgtgaaatggaagggagtaacatggtcacatataggtcatactgtacaaactggtattttatactgttccaatgccagtaatcaatttattttcttcattaaaataatatacacagaatgtattgttagttcgattccttcaaattttatacatatttactttctgttaaagagaaaaggataaaatggtataaaaaaagataaagctattaattaagcacgagagagaagataaatggatattttccctgtgtgaggctaagacagaagcaaatctcgttaagaaaaatgccacccacacaacaggaaatttatccaaaacaaaacaaaagcagttatagaaccccttctctaccatcagaagtaatttcacagcaataaacttattggttacaacagacatacttgaacagttaaggatgggaagaaaggcttaagatatcaccaaattaaaccgtacagtgagacaaagccttgccaaagggagggtaaaaatcatgaagtccagcatcagtgctcggtttaaatcatatattggtgacatacttatcacgaggacaagggggaaaaaaagtctagatttaccatgcaggagagatttattactctacttgcctttgataacctgattacatctagttgtttagcagtttagtattgtgttaaactgtttttacaacagagttttttctttttttttaattaaacccagtaagatgtacagaagacaatgaggcagtaaaaagtactgcttccaacagacagaggtgaaaggtcaaatgaggggccacagcaaagaggtcactagcagccacagccttctctctggggttggggttcactggttagccggcctccctgcggggctgaaggtttgtgttgtacaccagactcagcagcattcagatccaagcttccatcctgaatgttctgatagattttcttggcagcctcaaggaaggcatcttctacattctctcccctaagaggcaattgataactttattggagaactacagttttctacaaaagacaagacactgaccttttgctaatctttagttaactgccatgatgtctccaacttaaccactgtcatctaataagagattaccagaacactgagctaagagaacatggaaaactattttccttttttttttttttttttttttttgagacagagactcactctgtcaccaggctggagtgcagtggcccgatctcagctcactgcaacctccacctcccaagttcaagcgattctcctgcttcagcctcccgagtagctgggactacaggagcacaccaccacgcccagctaatttttgtatttttagtaaagacagggtttcaccatgttggccagggtggtctcgatctcctgacctcgtgatccgcctgccttggcttcccaaagtgctgggattacaggtatgagccaccacacccggccggaaaactactttctatggaaagcatacatacatacgtgtactgaaagccctttctacaaaccctatttggacaactacatgtgttatatgcaatcattaaaatactgtatgttaatacacaccatgacaattcagataggtcatttctgtgataacagagaggatactccaaacagaaatgaaatctctctgaacatgctgaaaaaaattccaagaataatatggtctgctcagccaagcatgaactgagctgtttttaatcgggtaatggtgacataatcatgcttagccacgttaacacctccattcagttttctttggactaatagcacagctgagactaaacgaaaacaggttagcctctcctcaccacaagaaatttttggcctaataaatgaagaacaatgatgggtgtaccacagttcaatagcagacatggaagaacaattagaaaatgttcactatgcttctgagtagacactattcccttaaatcatgctttttaatgtgatcagaagtattacaggaagaacagattgaccaagcttgtctgagatgccaaactcaacctcacttgtgaaaagtcaaacactgtcatttgggaaaagtcaaacacttctgaaatgtaaacaaagtttcatttattaacctgggttaccaacaggcataatcaaggtacaatcttttaagtaacaaaaattcatattattttgaaatgtaaaaaaggaagcaaagagatgtttgctgttcttcctgcagtaagcattacacatttatagatagtactttatatgtgtatatacattatatacttttcatatatacggttctactttgagaaacttgaatataattgaaatatctgtattttggtcacacttacgtttttgcactcgcttcgaggaacaataagcctaaaaataaaattcagactataattaggacacttcaaactaactcacaagtgcacttctttagtaacatctgaaaaagtttcccatcagtttttagtactcctcccatagtattttatgaaaaagtatgtaagtttgaggtggagagcatctttatatttgtcactaaataactgtactgctccaacataaatcacacagaaatagaaacacattgttacttcctcattcttgagatttctgagtctgcatttaaaaaaaaaatgcaaaaaaaaaaccaacaaaactgtcaagcccacctttccttaaaaattctcccaattgtgaccattaagtcttaaagaaactcaccattttcttcagcaaactgtttggcttcttcatatgtaacatctctctgtgcctccaaatctgctttatttcctatgagaattattacctaatttgtgatcaaaagaaagacaccttgtaacaaaagcagtaatttaaaccaaccatgcaaattctgaaatccaaaaatcttgatagaaaaaatgactgggcctaaaaagaaaaccaagtactagcaattatccactagacagggctacagattcatgaagtcattactacaaaggaccttagcaatgatctaggtcaggggttgacaaactttctgtaaagaataaatagtatattcttcaggtttgtgggcctcatatggtctctgttacatgttcgttgctgggtttttttgttgttgtttttaacaaccctttaaaaatttaaaaatcatccttagttcacaagccagtcaaaaacaggctgtgggctgaatgtggcccacaggccatacatactttggtgacacctggtctagtccaaagattacgatatagctgagtaagattactaagggttcatggacaagctccaggggatctgtaaataccttgaaatactgtaaatactgtaattgtgggcattccctagaggagaagattcatggcttccatcaggttttcaaacagttctgagatcctcaaaaagtttgaaagccactaggttcaactcctttaggctatcagtaaggaaactgaagctcaaataaggcaaaaggacttgctgaaggtcactcagtgagtcagtggtaggaggacattagatctcaggtagaaacccaaactgagatcttgagacaaatactatcctaccccacactatccctagaaaggattgagtttatagttaacagtaactgataagagatgtctatgtgtatacacaaggggcagctgggagtaggggtttgggggcacgtatgcagtaagttcaaatccaaggcaaaatatcacccaccaacctatatccaccttggaaccattcatacaagtgaagttaggccaaagttaaaggcagctctgcaaagttgtaagaaaaaaatatgtacccttgggaaacagcaaagggctttggcctttacctggggtggggaggggggttatggataaactgtctttgtacatttatgagcttatttgacaccaactggtaaaatccttccctttttcccccttccaaacagatatggtaatctagatatgaacactttaggaatggatggtttcaactaaaaggcacttcagccattaactttttttcatgtaaaattacagctcctggctcttccactttcaaaaatgtgtgtccataaaccaaataatcattttgatctgaatgtaaacctcatgcaaggacagttaagtagtacaacaaaagtgagcattctttaaacagtgtggacaaagtgcccactgtgaaggggaagaaactttcatatactatccattagtattttaaaagaataaaataatgatacttaaaaaggaaatcaatttataaaaaatcaagtctggtaaagccacaatgactagcatagggccattacaagataggtactcaaaacaagaaatactgccctgctcctgattccctatgaatctccaaataaggcttcttatctccctgaaagggaagacataaagtggcatgctaattacagagatacaaaacatgcccacaacaaaatggtagagaacacaacttctacacagaaatcaagggcaattctatagaaaatggagcacttaagaaaaactcaagaaattttttttctcctgatctggttctatttcaaagcacataaatgaggcaggaaggacacagggcggtaaggttaattttattatactcctccacgggccctctacaatgagttttgtttttaatattttacttgaaatagctatagagtcacagagacttacaaaaaataacagtgaggtcctgtgtacccttcaccaaacttccctaatggtaggatgttatgtaactataatacactctcaaaaccaggaaactgacattggtacaatctgcagcccttattcagatttcagtttttacacattctcaggcacatgtgcgttcgtgcatgggtggttctatgtaattttatctcaggtgcagatctccatcatcactatcaggatacagaactgttctatcactacaaagaaactgcttctgtgctgccctctatgtcatcacaccactaccaccctccaccccctttgctaatccctggcaatcactaatctactccccatctctacaattttgtcattttgagaatgttttctaaatgaaatcatacagtatgtaaacttttgagattggcttttgtactgggtatgatgcccttgagacccagctcaactgctgcatatataaagaattcattcctacgtacggcttagtagtactccactatagagatgttccgaactgtttaaccattcacctgtcaatggccaggttgggaaacacctaggtttccagttctgggctactggaaataaagctgctatgaacacccatctataggtgtgtatgtaaaccttgggtttaatgcgataatggaaatgaaagtttcaggcacagtccctagcatgataggcaaacaatgttaactgactctcaatatgattaaaccaccatttcctgataaaagctcatcttaccactgataacacagttcttgaaggaggcctctaccaaatgttgggggtataaagccaagtgagacacaagccttgctcctgagaaactcaagtcacagctcagtgtgtctttcttcacattgttcctggcataccctcaacaatatctactgaaacttcactcacccctcaaggaccagctcaaacaccactcctctgtaaagctgctttctctccagacggcactgatcatcctaggctctccagcactgtgccagtccctctatttctaattcgtgcttcaatctactttgcagcacagttatctgcatatctgctggttctctccctgctagactataagctctttgggaccaaggatccatgtttatctttgtaaactgcagagtctagcatggtggttagcctttaaaatctcaataaatatcatctcagtctggttaagaagctaatgttttaacacatatagaatcctttttatttttgactgaaatttttatccttaattctcctcctgtagttgaaatttttattgaggtaacgcagattcacatgcagttgtaaaaaacagtacagaaagatctcttctacgttttgcccagtatcctccaatgctaaagttttatgaaattaatgcagatcccttttaaaatcataatttcagatttcatagtcttcacatgagatcaccactacattcataatagtaatgacaaacatgaacaaaaaacctaggtataataaaatgcaaaacctggtttaataagaactgaaaaataactgttaggttttcttcaactaattgaagaatacaataaaaattctctcattcttagtacctgaagacaaaaatctcaccagtaaatggcttccctttttgggttagcttagttcttaaattttctgtgtaataagatgccatttaacttacagtatttggattggtgagattccttgcatctgtcaaccagctgcttaagtggttatatgtacttcttctgcaaaaataaaagtttaaatttgtgactgccatataattatagaaaaaaaacttaaatatttaaaatacatatttaatcaacatatcctaaaataataattttgctttgaccagttactcagaacagtagttgtgaaatacaactgcatacttttcaaaaatctagccaaacctaatatttttaaataaacaactcaatatccaacaactttgataattacaggtcaggagtaaattgtttactcctaaaagcataccgtaaacagaccaataagcaagcaaggaacaacacagtaaattgatggaaatgccaatgtggagtcaaaactcaaattactttgaaatcatacagactttcaatcacaaagcacaaagttgtatcaaaatgcctaaacatgacacatttaatggaagacacttttgcttgtctttaaattttaatttcattaaaaaccaagtcacactattataagctggcatacaattcacctttccttaataatttaaagagcaagctaactataacagcataaaattgactttgaagacatttgacaagaattcaagtccccagatatcagtgaaaaagttcgtcctaactttgttctcttatctatcaggcagctaaattattctggaattctaactgcccaagcaagagtttaaaaactcataggctcatttgcactagccaagtaagctctaagataagtaaacaaacccaaatatttgtaatatcatacacagtagaatctaccaaaggggtcaaagataataaaatttttgaggttaaaaatgtttctgatttatagactcacagaatgttagtctatcttactcgtttaacatgtgaggaaacggaagcccataaagacttaactggtgtcaaaatcaggcctagaactcttttacaaataccacatgtcctttaagtgtttctagtttagtcctgtgaatatattccatgatctctagctgccagttctcatagaaaatctgttattcaaagtatatagttctttcccaatgagaactgaaaagaactccttagtcagacttttattgtgttacatcatattattca

SEQ ID NO: 1226 - DNA, 2731 bp, Homo sapiens
tgtggctgtcagagagggaagtgcacatgaatttgaagacagcattagaaagcgttccgcccacagtttctctgttctcaacggctcagttttaacaggataaattttaagttaagtcccatatgaaggctcaaaagagcggtaaagaacaacagcttgacattatgaacaagcagtaccaacaacttgaaagtcgtttggatgagatactttctagaattgctaaggaaacggaagagattaaggaccttgaagaacagcttactgaaggccagatagcagcaaatgaagccctgaagaaggatttagaaggtgttatcagtgggttgcaagaatacctggggaccattaaaggccaggcaactcaggcccagaatgagtgcaggaagctgcgggatgagaaagagacattgttgcagagattgacagaagtcgagcaggagagagaccagctggaaatagttgccatggatgcagaaaatatgaggaaggagcttgcagagctagaaagtgccctccaagagcagcatgaggtgaatgcatctttgcagcagacccagggagatctcagtgcctatgaagctgagctagaggctcggctaaacctaagggatgctgaagccaaccagctcaaggaagagttggaaaaagtaacaagacttacccagcccttcaagcagaacttgagaaggaaaggcaagccctcaagaatgcccttggaaaagcccagttctcagaagaaaaggagcaagagaacagtgagctccatgcaaaacttaaacacttgcaggatgacaataatctgttaaaacagcaacttaaagatttccagaatcaccttaaccatgtggttgatggtttggttcgtccagaagaagtggcagctcgtgtggatgagctaagaagaaaactgaaattaggaactggggaaatgaacatccatagtccttcagatgtcttagggaaaagtcttgctgatttacagaaacaattcagtgaaattcttgcacgctccaagtgggaaagagatgaagcacaagttagagagagaaaactccaagaagaaatggctctgcagcaagagaaactggcaactggacaagaagagttcaggcaggcctgtgagagagccctggaagcaagagtaagacaagggcaagaggcacctggagggaagtgtttggcaaatattaatatgaattttgataagaggcaacatgaagcaagaatccagcaaatggagaatgaaattcactatttgcaagaaaatctaaaaagtatggaggaaatccaaggccttacagatctccaacttcaggaagctgatgaagagaaggagagaattctggcccaactccgagagttagagaaaaagaagaaacttgaagatgccaaatctcaggagcaagtttttggtttagataaagaactgaagaaactaaagaaagccgtggccacctctgataagctagccacagctgagctcaccattgccaaagaccagctgaagtcccttcatggaactgttatgaaaattaaccaggagcgagcagaggagttgcaggaagcagagaggttcagcagaaaggcagcacaagcagccagagatctcacccgagcagaagctgagatcgaactcctgcagaatctcctcaggcagaagggggagcagtttcgacttgagatggagaaaacaggtgtaggtactggagcaaactcacaggtcctagaaattgagaaactgaatgagacaatggaacgacaaaggacagagattgcaaggctgcagaatgtactagacctcactggaagtgacaacaaaggaggctttgaaaatgttttagaagaaattgctgaacttcgacgtgaagtttcttatcagaatgattacataagcagcatggcagatcctttcaaaagacgaggctattggtactttatgccaccaccaccatcatcaaaagtttccagccatagttcccaggccaccaaggactctggtgttggccttaagtactcagcctcaactcctgttagaaaaccacgccctgggcagcaggatgggaaggaaggcagtcaacctccccctgcctcaggatactgggtttattctcccatcaggagtgggttacataaactgtttccaagtagagatgcagacagtggaggagatagtcaggaagagagtgagctggatgaccaagaagaacccccatttgtgcctcctcctggatacatgatgtatactgtgcttcctgatggttctcctgtaccccagggcatggccctgtatgcaccacctcctcccttgccaaacaatagccgacctctcacccctggcactgttgtttatggcccacctcctgctggggcccccatggtgtatgggcctccaccccccaacttctccatccccttcatccctatgggtgtgctgcattgcaacgtccctgaacaccataacttagtaagtggaaagacatacaactctctttccacactgcttccatgggtgactgataaggttatatacttaatgagttgacctatttatgactggattatatggcaaagtgtgtttgtaaggctgatgtttagaactgtgcaagcattctcttattaaaattctcttataaaagcagtggcatgtgcctataatccgagctactcaggagactgagacaagaggattgcttgagcctaggaattcaaggccagccccggtaacagc

SEQ ID NO: 1227 - protein, 537 aa, Homo sapiens
MNIHSPSDVLGKSLADLQKQFSEILARSKWERDEAQVRERKLQEEMALQQEKLATGQEEFRQACERALEARVRQGQEAPGGKCLANINMNFDKRQHEARIQQMENEIHYLQENLKSMEEIQGLTDLQLQEADEEKERILAQLRELEKKKKLEDAKSQEQVFGLDKELKKLKKAVATSDKLATAELTIAKDQLKSLHGTVMKINQERAEELQEAERFSRKAAQAARDLTRAEAEIELLQNLLRQKGEQFRLEMEKTGVGTGANSQVLEIEKLNETMERQRTEIARLQNVLDLTGSDNKGGFENVLEEIAELRREVSYQNDYISSMADPFKRRGYWYFMPPPPSSKVSSHSSQATKDSGVGLKYSASTPVRKPRPGQQDGKEGSQPPPASGYWVYSPIRSGLHKLFPSRDADSGGDSQEESELDDQEEPPFVPPPGYMMYTVLPDGSPVPQGMALYAPPPPLPNNSRPLTPGTVVYGPPPAGAPMVYGPPPPNFSIPFIPMGVLHCNVPEHHNLVSGKTYNSLSTLLPWVTDKVIYLMS

SEQ ID NO: 1228 - DNA, 5461 bp, Homo sapiens
tgtggctgtcagagagggaagtgcacatgaatttgaagacagcattagaaagcgttccgcccacagtttctctgttctcaacggctcagttttaacaggataaattttaagttaagtcccatatgaaggctcaaaagagcggtaaagaacaacagcttgacattatgaacaagcagtaccaacaacttgaaagtcgtttggatgagatactttctagaattgctaaggaaacggaagagattaaggaccttgaagaacagcttactgaaggccagatagcagcaaatgaagccctgaagaaggatttagaaggtgttatcagtgggttgcaagaatacctggggaccattaaaggccaggcaactcaggcccagaatgagtgcaggaagctgcgggatgagaaagagacattgttgcagagattgacagaagtcgagcaggagagagaccagctggaaatagttgccatggatgcagaaaatatgaggaaggagcttgcagagctagaaagtgccctccaagagcagcatgaggtgaatgcatctttgcagcagacccagggagatctcagtgcctatgaagctgagctagaggctcggctaaacctaagggatgctgaagccaaccagctcaaggaagagttggaaaaagtaacaagacttacccagcccttcaagcagaacttgagaaggaaaggcaagccctcaagaatgcccttggaaaagcccagttctcagaagaaaaggagcaagagaacagtgagctccatgcaaaacttaaacacttgcaggatgacaataatctgttaaaacagcaacttaaagatttccagaatcaccttaaccatgtggttgatggtttggttcgtccagaagaagtggcagctcgtgtggatgagctaagaagaaaactgaaattaggaactggggaaatgaacatccatagtccttcagatgtcttagggaaaagtcttgctgatttacagaaacaattcagtgaaattcttgcacgctccaagtgggaaagagatgaagcacaagttagagagagaaaactccaagaagaaatggctctgcagcaagagaaactggcaactggacaagaagagttcaggcaggcctgtgagagagccctggaagcaagaatgaattttgataagaggcaacatgaagcaagaatccagcaaatggagaatgaaattcactatttgcaagaaaatctaaaaagtatggaggaaatccaaggccttacagatctccaacttcaggaagctgatgaagagaaggagagaattctggcccaactccgagagttagagaaaaagaagaaacttgaagatgccaaatctcaggagcaagtttttggtttagataaagaactgaagaaactaaagaaagccgtggccacctctgataagctagccacagctgagctcaccattgccaaagaccagctgaagtcccttcatggaactgttatgaaaattaaccaggagcgagcagaggagttgcaggaagcagagaggttcagcagaaaggcagcacaagcagccagagatctcacccgagcagaagctgagatcgaactcctgcagaatctcctcaggcagaagggggagcagtttcgacttgagatggagaaaacaggtgtaggtactggagcaaactcacaggtcctagaaattgagaaactgaatgagacaatggaacgacaaaggacagagattgcaaggctgcagaatgtactagacctcactggaagtgacaacaaaggaggctttgaaaatgttttagaagaaattgctgaacttcgacgtgaagtttcttatcagaatgattacataagcagcatggcagatcctttcaaaagacgaggctattggtactttatgccaccaccaccatcatcaaaagtttccagccatagttcccaggccaccaaggactctggtgttggccttaagtactcagcctcaactcctgttagaaaaccacgccctgggcagcaggatgggaaggaaggcagtcaacctccccctgcctcaggatactgggtttattctcccatcaggagtgggttacataaactgtttccaagtagagatgcagacagtggaggagatagtcaggaagagagtgagctggatgaccaagaagaacccccatttgtgcctcctcctggatacatgatgtatactgtgcttcctgatggttctcctgtaccccagggcatggccctgtatgcaccacctcctcccttgccaaacaatagccgacctctcacccctggcactgttgtttatggcccacctcctgctggggcccccatggtgtatgggcctccaccccccaacttctccatccccttcatccctatgggtgtgctgcattgcaacgtccctgaacaccataacttagagaatgaagtttctagattagaagacataatgcagcatttaaaatcaaagaagcgggaagaaaggtggatgagagcatccaagcggcagtcggagaaagaaatggaagaactgcatcataatattgatgatcttttgcaagagaagaaaagcttagagtgtgaagtagaagaattacatagaactgtccagaaacgtcaacagcaaaaggacttcattgatggaaatgtagagagtcttatgactgaactagaaatagaaaaatcactcaaacatcatgaagatattgtagatgaaattgagtgcattgagaagactcttctgaaacgtcgctcagagctcagggaagctgaccgactcctggcagaggctgagagtgaactttcatgcactaaagaaaaggtttgtcttcttgtggtttggggtgtgagctcagtgtggacaaaaaatgctgttgaaaagttcactgatgccaagagaagtttattgcaaactgagtcagatgctgaggaattagaaaggagagctcaggaaactgctgttaacctcgtcaaagctgatcagcagctaagatcgctccaggctgatgcaaaggatttggagcagcacaaaatcaagcaagaagaaatcttgaaagaaataaacaaaattgtagcagcaaaagactcagacttccaatgtttaagcaagaagaaggaaaaactgacagaagagcttcagaaactacagaaagacatagagatggcagaacgcaatgaggatcaccacctgcaggtccttaaagaatctgaggtgcttcttcaggccaaaagagccgagctggaaaagctgaaaagccaggtgacaagtcagcagcaggagatggctgtcttggacaggcagttagggcataaaaaggaggagctgcatctactccaaggaagcatggtccaggcaaaagctgacctccaggaagctctgagactgggagagactgaagtaactgagaagtgcaatcacattagggaagtaaaatctcttctggaagaactgagttttcagaaaggagaactaaatgttcagattagtgaaagaaaaactcaacttacacttataaagcaggaaattgaaaaagaggaagaaaatcttcaggttgttttaaggcagatgtctaaacataaaaccgaactaaagaatattctggacatgttgcaacttgaaaaccatgagctacaaggtttgaagctacaacatgaccaaagggtatctgaattagagaagactcaggtggcagtgctagaggagaaactggagttagagaatttgcagcagatatcccagcagcagaaaggggaaatagagtggcagaagcagctccttgagagggataaacgagaaatagaacgaatgactgctgagtcccgagctttacaatcgtgtgttgagtgtttgagcaaagaaaaggaagatctccaagagaaatgtgacatttgggaaaaaaagttggcacaaaccaaaagggttttagcagcagcagaagaaaatagcaaaatggagcaatcaaacttagaaaagttggaattgaatgtcagaaaactgcagcaggaactagaccaactaaacagagacaagttgtcactgcataacgacatttcagcaatgcaacagcagctccaagaaaaacgagaagcagtaaactcactgcaggaggaactagctaatgtccaagaccatttgaacctagcaaaacaggacctgcttcacaccaccaagcatcaggatgtgttgctcagtgagcagacccgactccagaaggacatcagtgaatgggcaaataggtttgaagactgtcagaaagaagaggagacaaaacaacaacaacttcaagtgcttcagaatgagattgaagaaaacaagctcaaactagtccaacaagaaatgatgtttcagagactccagaaagagagagaaagtgaagaaagcaaattagaaaccagtaaagtgacactgaaggagcaacagcaccagctggaaaaggaattaacagaccagaaaagcaaactggaccaagtgctctcaaaggtgctggcagctgaagagcgtgttaggactctgcaggaagaggagaggtggtgtgagagcctggagaagacactctcccaaactaaacggcagctttcagaaagggagcagcaattggtggagaaatcaggtgagctgttggccctccagaaagaggcagattctatgagggcagacttcagccttctgcggaaccagttcttgacagaaagaaagaaagctgagaagcaggtggccagcctgaaggaagcacttaagatccagcggagccagctggagaaaaaccttcttgagcaaaaacaggagaacagctgcatacaaaaggaaatggcaacaattgaactggtagcccaggacaaccatgagcgggccaggcgcctgatgaaggagctcaaccagatgcagtatgagtacacggagctcaagaaacagatggcaaaccaaaaagatttggagagaagacaaatggaaatcagtgatgcaatgaggacacttaaatctgaggtgaaggatgaaatcagaaccagcttgaagaatcttaatcagtttcttccagaactaccagcagatctagaagctattttggaaagaaacgaaaacctagaaggagaattggaaagcttgaaagagaaccttccatttaccatgaatgagggaccttttgaagaaaaactgaacttttcccaagttcacataatggatgaacactggcgtggagaagcactccgggagaaactgcgtcaccgggaagaccgactcaaggcccaactccgacactgtatgtccaagcaagcagaagtattaattaaaggaaagcggcagacagagggcactttacacagtttgaggagacaagtagatgctttaggggaattggtcaccagcacctctgcagattcagcgtcatcacccagtctgtctcagctggagtcttccctcacagaggactctcaacttggacaaaatcaggtaagcagcagctct

SEQ ID NO: 1229 - protein, 1504 aa, Homo sapiens
MNIHSPSDVLGKSLADLQKQFSEILARSKWERDEAQVRERKLQEEMALQQEKLATGQEEFRQACERALEARMNFDKRQHEARIQQMENEIHYLQENLKSMEEIQGLTDLQLQEADEEKERILAQLRELEKKKKLEDAKSQEQVFGLDKELKKLKKAVATSDKLATAELTIAKDQLKSLHGTVMKINQERAEELQEAERFSRKAAQAARDLTRAEAEIELLQNLLRQKGEQFRLEMEKTGVGTGANSQVLEIEKLNETMERQRTEIARLQNVLDLTGSDNKGGFENVLEEIAELRREVSYQNDYISSMADPFKRRGYWYFMPPPPSSKVSSHSSQATKDSGVGLKYSASTPVRKPRPGQQDGKEGSQPPPASGYWVYSPIRSGLHKLFPSRDADSGGDSQEESELDDQEEPPFVPPPGYMMYTVLPDGSPVPQGMALYAPPPPLPNNSRPLTPGTVVYGPPPAGAPMVYGPPPPNFSIPFIPMGVLHCNVPEHHNLENEVSRLEDIMQHLKSKKREERWMRASKRQSEKEMEELHHNIDDLLQEKKSLECEVEELHRTVQKRQQQKDFIDGNVESLMTELEIEKSLKHHEDIVDEIECIEKTLLKRRSELREADRLLAEAESELSCTKEKVCLLVVWGVSSVWTKNAVEKFTDAKRSLLQTESDAEELERRAQETAVNLVKADQQLRSLQADAKDLEQHKIKQEEILKEINKIVAAKDSDFQCLSKKKEKLTEELQKLQKDIEMAERNEDHHLQVLKESEVLLQAKRAELEKLKSQVTSQQQEMAVLDRQLGHKKEELHLLQGSMVQAKADLQEALRLGETEVTEKCNHIREVKSLLEELSFQKGELNVQISKTQLTLIKQEIEKEEENLQVVLRQMSKHKTELKNILDMLQLENHELQGLKLQHDQRVSELEKTQVAVLEEKLELENLQQISQQQKGEIEWQKQLLERDKREIERMTAESRALQSCVECLSKEKEDLQEKCDIWEKKLAQTKRVLAAAEENSKMEQSNLEKLELNVRKLQQELDQLNRDKLSLHNDISAMQQQLQEKREAVNSLQEELANVQDHLNLAKQDLLHTTKHQDVLLSEQTRLQKDISEWANRFEDCQKEEETKQQQLQVLQNEIEENKLKLVQQEMMFQRLQKERESEESKLETSKVTLKEQQHQLEKELTDQKSKLDQVLSKVLAAEERVRTLQEEERWCESLEKTLSQTKRQLSEQQLVEKSGELLALQKEADSMRADFSLLRNQFLTERKKAEKQVASLKEALKIQRSQLEKNLLEQKQENSCIQKEMATIELVAQDNHERARRLMKELNQMQYEYTELKKQMANQKDLERRQMEISDAMRTLKSEVKDEIRTSLKNLNQFLPELPADLEAIRNENLEGELESLKENLPFTMNEGPFEEKLNFSQVHIMDEHWRGEALREKLRHREDRLKAQLRHCMSKQAEVLIKGKRQTEGTLHSLRRQVDALGELVTSTSADSASSPSLSQLESSLTEDSQLGQNQVSSSS

SEQ ID NO: 1230 - DNA, 4379 bp, Homo sapiens
cacttttatacttcccttcgtttgcatgtgttacttcttcagcctaggtctttccccttccgttcgttcttcaaaacccaggcaaaacacctcttcctctgagcagccttctcagaacttttctcccatgtggccagaggaaggagagacttctgtctatctcttctgctagaccccgaactctttggaggcagaggttatccacaagaggcttggcaaatgtttctcagtcatagttggactgtttgaaaaattaaaggttctatttgtctgtcagtttcatccgtgacatttaactttttataccaaagtcttagaatctaccatcattttttgggccattgataccactttaaccacagttaatttcagcttttggcaggaaagagaggaaacatcctgtgatgtttcagcactgcatttttttccccatctcattcaggagaatgaagtttctagattagaagacataatgcagcatttaaaatcaaagaagcgggaagaaaggtggatgagagcatccaagcggcagtcggagaaagaaatggaagaactgcatcataatattgatgatcttttgcaagagaagaaaagcttagagtgtgaagtagaagaattacatagaactgtccagaaacgtcaacagcaaaaggacttcattgatggaaatgtagagagtcttatgactgaactagaaatagaaaaatcactcaaacatcatgaagatattgtagatgaaattgagtgcattgagaagactcttctgaaacgtcgctcagagctcagggaagctgaccgactcctggcagaggctgagagtgaactttcatgcactaaagaaaagacaaaaaatgctgttgaaaagttcactgatgccaagagaagtttattgcaaactgagtcagatgctgaggaattagaaaggagagctcaggaaactgctgttaacctcgtcaaagctgatcagcagctaagatcgctccaggctgatgcaaaggatttggagcagcacaaaatcaagcaagaagaaatcttgaaagaaataaacaaaattgtagcagcaaaagactcagacttccaatgtttaagcaagaagaaggaaaaactgacagaagagcttcagaaactacagaaagacatagagatggcagaacgcaatgaggatcaccacctgcaggtccttaaagaatctgaggtgcttcttcaggccaaaagagccgagctggaaaagctgaaaagccaggtgacaagtcagcagcaggagatggctgtcttggacaggcagttagggcataaaaaggaggagctgcatctactccaaggaagcatggtccaggcaaaagctgacctccaggaagctctgagactgggagagactgaagtaactgagaagtgcaatcacattagggaagtaaaatctcttctggaagaactgagttttcagaaaggagaactaaatgttcagattagtgaaagaaaaactcaacttacacttataaagcaggaaattgaaaaagaggaagaaaatcttcaggttgttttaaggcagatgtctaaacataaaaccgaactaaagaatattctggacatgttgcaacttgaaaaccatgagctacaaggtttgaagctacaacatgaccaaagggtatctgaattagagaagactcaggtggcagtgctagaggagaaactggagttagagaatttgcagcagatatcccagcagcagaaaggggaaatagagtggcagaagcagctccttgagagggataaacgagaaatagaacgaatgactgctgagtcccgagctttacaatcgtgtgttgagtgtttgagcaaagaaaaggaagatctccaagagaaatgtgacatttgggaaaaaaagttggcacaaaccaaaagggttttagcagcagcagaagaaaatagcaaaatggagcaatcaaacttagaaaagttggaattgaatgtcagaaaactgcagcaggaactagaccaactaaacagagacaagttgtcactgcataacgacatttcagcaatgcaacagcagctccaagaaaaacgagaagcagtaaactcactgcaggaggaactagctaatgtccaagaccatttgaacctagcaaaacaggacctgcttcacaccaccaagcatcaggatgtgttgctcagtgagcagacccgactccagaaggacatcagtgaatgggcaaataggtttgaagactgtcagaaagaagaggagacaaaacaacaacaacttcaagtgcttcagaatgagattgaagaaaacaagctcaaactagtccaacaagaaatgatgtttcagagactccagaaagagagagaaagtgaagaaagcaaattagaaaccagtaaagtgacactgaaggagcaacagcaccagctggaaaaggaattaacagaccagaaaagcaaactggaccaagtgctctcaaaggtgctggcagctgaagagcgtgttaggactctgcaggaagaggagaggtggtgtgagagcctggagaagacactctcccaaactaaacggcagctttcagaaagggagcagcaattggtggagaaatcaggtgagctgttggccctccagaaagaggcagattctatgagggcagacttcagccttctgcggaaccagttcttgacagaaagaaagaaagctgagaagcaggtggccagcctgaaggaagcacttaagatccagcggagccagctggagaaaaaccttcttgagcaaaaacaggagaacagctgcatacaaaaggaaatggcaacaattgaactggtagcccaggacaaccatgagcgggccaggcgcctgatgaaggagctcaaccagatgcagtatgagtacacggagctcaagaaacagatggcaaaccaaaaagatttggagagaagacaaatggaaatcagtgatgcaatgaggacacttaaatctgaggtgaaggatgaaatcagaaccagcttgaagaatcttaatcagtttcttccagaactaccagcagatctagaagctattttggaaagaaacgaaaacctagaaggagaattggaaagcttgaaagagaaccttccatttaccatgaatgagggaccttttgaagaaaaactgaacttttcccaagttcacataatggatgaacactggcgtggagaagcactccgggagaaactgcgtcaccgggaagaccgactcaaggcccaactccgacactgtatgtccaagcaagcagaagtattaattaaaggaaagcggcagacagagggcactttacacagtttgaggagacaagtagatgctttaggggaattggtcaccagcacctctgcagattcagcgtcatcacccagtctgtctcagctggagtcttccctcacagaggactctcaacttggacaaaatcaggaaaagaatgcctcagccagatgaggaatactgtcttgtgtaaatatattcaaggaaaacacctccactacctcactgacttcataattggaatgtcacatggtttttttaatcaagatgcagtgaactgagattctgaaactccactgtagtttactttgcctgtaccattaatgccaatgtttttataaatcacttgtacatagtacatatgggaatagttgcatatgggaatttaaaccaacatgtggctgagcctttttttttttaatcttcgtaacatgtttaaaaaaaaacagtgattttaactgcatatttgaacctacaaactggtaaatcttattaacaaaaagaatgtacttaaggccctctttatttatagtgtcgagttatttttgaattttgcttaaaatctatttttcatatgaaaataaaagataacaatcaacttgggtctgtcctctgactttacacttcacaggtcattctatggaaaagccgtcaaatttttaccttattccaagtaagtaatctttcaggtggttttcttttacctggaggctgaagtacattatacttatcaatgaagatttcatcatttggaaatacatcaattataaaactattatgcttcagatgcctttccttagccaacatattctttggtggaaaatcaggaaaactttgtaccttggagaatgtgacccagtgataaattcaaattgtgttgcctttcagattttgaactaccataattaacagctcaactccatgatgtatacatttctttaaaaactagaatagcaactgctctcacagtctggcataattattcccaagggggaaatatgtaataagaagttttaaaatattctcgggaactcttttctagatcactactagacagcttttgagtcacaacaggtatgttaccctgttactaata

SEQ ID NO: 1231 - protein, 988 aa, Homo sapiens
MQHLKSKKREERWMRASKRQSEKEMEELHHNIDDLLQEKKSLECEVEELHRTVQKRQQQKDFIDGNVESLMTELEIEKSLKHHEDIVDEIECIEKTLLKRRSELREADRLLAEAESELSCTKEKTKNAVEKFTDAKRSLLQTESDAEELERRAQETAVNLVKADQQLRSLQADAKDLEQHKIKQEEILKEINKIVAAKDSDFQCLSKKKEKLTEELQKLQKDIEMAERNEDHHLQVLKESEVLLQAKRAELEKLKSQVTSQQQEMAVLDRQLGHKKEELHLLQGSMVQAKADLQEALRLGETEVTEKCNHIREVKSLLEELSFQKGELNVQISKTQLTLIKQEIEKEEENLQVVLRQMSKHKTELKNILDMLQLENHELQGLKLQHDQRVSELEKTQVAVLEEKLELENLQQISQQQKGEIEWQKQLLERDKREIERMTAESRALQSCVECLSKEKEDLQEKCDIWEKKLAQTKRVLAAAEENSKMEQSNLEKLELNVRKLQQELDQLNRDKLSLHNDISAMQQQLQEKREAVNSLQEELANVQDHLNLAKQDLLHTTKHQDVLLSEQTRLQKDISEWANRFEDCQKEEETKQQQLQVLQNEIEENKLKLVQQEMMFQRLQKERESEESKLETSKVTLKEQQHQLEKELTDQKSKLDQVLSKVLAAEERVRTLQEEERWCESLEKTLSQTKRQLSEQQLVEKSGELLALQKEADSMRADFSLLRNQFLTERKKAEKQVASLKEALKIQRSQLEKNLLEQKQENSCIQKEMATIELVAQDNHERARRLMKELNQMQYEYTELKKQMANQKDLERRQMEISDAMRTLKSEVKDEIRTSLKNLNQFLPELPADLEAIRNENLEGELESLKENLPFTMNEGPFEEKLNFSQVHIMDEHWRGEALREKLRHREDRLKAQLRHCMSKQAEVLIKGKRQTEGTLHSLRRQVDALGELVTSTSADSASSPSLSQLESSLTEDSQLGQNQEKNASAR

SEQ ID NO: 1232 - DNA, 5391 bp, Homo sapiens
gccggaaagcagaaggagattaaggacctgcaaatagccatagatagcctggattccaaagacccaaaacattcccatatgaaggctcaaaagagcggtaaagaacaacagcttgacattatgaacaagcagtaccaacaacttgaaagtcgtttggatgagatactttctagaattgctaaggaaacggaagagattaaggaccttgaagaacagcttactgaaggccagatagcagcaaatgaagccctgaagaaggatttagaaggtgttatcagtgggttgcaagaatacctggggaccattaaaggccaggcaactcaggcccagaatgagtgcaggaagctgcgggatgagaaagagacattgttgcagagattgacagaagtcgagcaggagagagaccagctggaaatagttgccatggatgcagaaaatatgaggaaggagcttgcagagctagaaagtgccctccaagagcagcatgaggtgaatgcatctttgcagcagacccagggagatctcagtgcctatgaagctgagctagaggctcggctaaacctaagggatgctgaagccaaccagctcaaggaagagttggaaaaagtaacaagacttacccagttagaacaatcagcccttcaagcagaacttgagaaggaaaggcaagccctcaagaatgcccttggaaaagcccagttctcagaagaaaaggagcaagagaacagtgagctccatgcaaaacttaaacacttgcaggatgacaataatctgttaaaacagcaacttaaagatttccagaatcaccttaaccatgtggttgatggtttggttcgtccagaagaagtggcagctcgtgtggatgagctaagaagaaaactgaaattaggaactggggaaatgaacatccatagtccttcagatgtcttagggaaaagtcttgctgatttacagaaacaattcagtgaaattcttgcacgctccaagtgggaaagagatgaagcacaagttagagagagaaaactccaagaagaaatggctctgcagcaagagaaactggcaactggacaagaagagttcaggcaggcctgtgagagagccctggaagcaagaatgaattttgataagaggcaacatgaagcaagaatccagcaaatggagaatgaaattcactatttgcaagaaaatctaaaaagtatggaggaaatccaaggccttacagatctccaacttcaggaagctgatgaagagaaggagagaattctggcccaactccgagagttagagaaaaagaagaaacttgaagatgccaaatctcaggagcaagtttttggtttagataaagaactgaagaaactaaagaaagccgtggccacctctgataagctagccacagctgagctcaccattgccaaagaccagctgaagtcccttcatggaactgttatgaaaattaaccaggagcgagcagaggagttgcaggaagcagagaggttcagcagaaaggcagcacaagcagccagagatctcacccgagcagaagctgagatcgaactcctgcagaatctcctcaggcagaagggggagcagtttcgacttgagatggagaaaacaggtgtaggtactggagcaaactcacaggtcctagaaattgagaaactgaatgagacaatggaacgacaaaggacagagattgcaaggctgcagaatgtactagacctcactggaagtgacaacaaaggaggctttgaaaatgttttagaagaaattgctgaacttcgacgtgaagtttcttatcagaatgattacataagcagcatggcagatcctttcaaaagacgaggctattggtactttatgccaccaccaccatcatcaaaagtttccagccatagttcccaggccaccaaggactctggtgttggccttaagtactcagcctcaactcctgttagaaaaccacgccctgggcagcaggatgggaaggaaggcagtcaacctccccctgcctcaggatactgggtttattctcccatcaggagtgggttacataaactgtttccaagtagagatgcagacagtggaggagatagtcaggaagagagtgagctggatgaccaagaagaacccccatttgtgcctcctcctggatacatgatgtatactgtgcttcctgatggttctcctgtaccccagggcatggccctgtatgcaccacctcctcccttgccaaacaatagccgacctctcacccctggcactgttgtttatggcccacctcctgctggggcccccatggtgtatgggcctccaccccccaacttctccatccccttcatccctatgggtgtgctgcattgcaacgtccctgaacaccataacttagagaatgaagtttctagattagaagacataatgcagcatttaaaatcaaagaagcgggaagaaaggtggatgagagcatccaagcggcagtcggagaaagaaatggaagaactgcatcataatattgatgatcttttgcaagagaagaaaagcttagagtgtgaagtagaagaattacatagaactgtccagaaacgtcaacagcaaaaggacttcattgatggaaatgtagagagtcttatgactgaactagaaatagaaaaatcactcaaacatcatgaagatattgtagatgaaattgagtgcattgagaagactcttctgaaacgtcgctcagagctcagggaagctgaccgactcctggcagaggctgagagtgaactttcatgcactaaagaaaagacaaaaaatgctgttgaaaagttcactgatgccaagagaagtttattgcaaactgagtcagatgctgaggaattagaaaggagagctcaggaaactgctgttaacctcgtcaaagctgatcagcagctaagatcgctccaggctgatgcaaaggatttggagcagcacaaaatcaagcaagaagaaatcttgaaagaaataaacaaaattgtagcagcaaaagactcagacttccaatgtttaagcaagaagaaggaaaaactgacagaagagcttcagaaactacagaaagacatagagatggcagaacgcaatgaggatcaccacctgcaggtccttaaagaatctgaggtgcttcttcaggccaaaagagccgagctggaaaagctgaaaagccaggtgacaagtcagcagcaggagatggctgtcttggacaggcagttagggcataaaaaggaggagctgcatctactccaaggaagcatggtccaggcaaaagctgacctccaggaagctctgagactgggagagactgaagtaactgagaagtgcaatcacattagggaagtaaaatctcttctggaagaactgagttttcagaaaggagaactaaatgttcagattagtgaaagaaaaactcaacttacacttataaagcaggaaattgaaaaagaggaagaaaatcttcaggttgttttaaggcagatgtctaaacataaaaccgaactaaagaatattctggacatgttgcaacttgaaaaccatgagctacaaggtttgaagctacaacatgaccaaagggtatctgaattagagaagactcaggtggcagtgctagaggagaaactggagttagagaatttgcagcagatatcccagcagcagaaaggggaaatagagtggcagaagcagctccttgagagggataaacgagaaatagaacgaatgactgctgagtcccgagctttacaatcgtgtgttgagtgtttgagcaaagaaaaggaagatctccaagagaaatgtgacatttgggaaaaaaagttggcacaaaccaaaagggttttagcagcagcagaagaaaatagcaaaatggagcaatcaaacttagaaaagttggaattgaatgtcagaaaactgcagcaggaactagaccaactaaacagagacaagttgtcactgcataacgacatttcagcaatgcaacagcagctccaagaaaaacgagaagcagtaaactcactgcaggaggaactagctaatgtccaagaccatttgaacctagcaaaacaggacctgcttcacaccaccaagcatcaggatgtgttgctcagtgagcagacccgactccagaaggacatcagtgaatgggcaaataggtttgaagactgtcagaaagaagaggagacaaaacaacaacaacttcaagtgcttcagaatgagattgaagaaaacaagctcaaactagtccaacaagaaatgatgtttcagagactccagaaagagagagaaagtgaagaaagcaaattagaaaccagtaaagtgacactgaaggagcaacagcaccagctggaaaaggaattaacagaccagaaaagcaaactggaccaagtgctctcaaaggtgctggcagctgaagagcgtgttaggactctgcaggaagaggagaggtggtgtgagagcctggagaagacactctcccaaactaaacggcagctttcagaaagggagcagcaattggtggagaaatcaggtgagctgttggccctccagaaagaggcagattctatgagggcagacttcagccttctgcggaaccagttcttgacagaaagaaagaaagctgagaagcaggtggccagcctgaaggaagcacttaagatccagcggagccagctggagaaaaaccttcttgagcaaaaacaggagaacagctgcatacaaaaggaaatggcaacaattgaactggtagcccaggacaaccatgagcgggccaggcgcctgatgaaggagctcaaccagatgcagtatgagtacacggagctcaagaaacagatggcaaaccaaaaagatttggagagaagacaaatggaaatcagtgatgcaatgaggacacttaaatctgaggtgaaggatgaaatcagaaccagcttgaagaatcttaatcagtttcttccagaactaccagcagatctagaagctattttggaaagaaacgaaaacctagaaggagaattggaaagcttgaaagagaaccttccatttaccatgaatgagggaccttttgaagaaaaactgaacttttcccaagttcacataatggatgaacactggcgtggagaagcactccgggagaaactgcgtcaccgggaagaccgactcaaggcccaactccgacactgtatgtccaagcaagcagaagtattaattaaaggaaagcggcagacagagggcactttacacagtttgaggagacaagtagatgctttaggggaattggtcaccagcacctctgcagattcagcgtcatcacccagtctgtctcagctggagtcttccctcacagaggactctcaacttggacaaaatcaggtaagcagcagctct

SEQ ID NO: 1233 - protein, 1765 aa, Homo sapiens
MKAQKSGKEQQLDIMNKQYQQLESRLDEILSRIAKETEEIKDLEEQLTEGQIAANEALKKDLEGVISGLQEYLGTIKGQATQAQNECRKLRDEKETLLQRLTEVEQERDQLEIVAMDAENMRKELAELESALQEQHEVNASLQQTQGDLSAYEAELEARLNLRDAEANQLKEELEKVTRLTQLEQSALQAELEKERQALKNALGKAQFSEEKEQENSELHAKLKHLQDDNNLLKQQLKDFQNHLNHVVDGLVRPEEVAARVDELRRKLKLGTGEMNIHSPSDVLGKSLADLQKQFSEILARSKWERDEAQVRERKLQEEMALQQEKLATGQEEFRQACERALEARMNFDKRQHEARIQQMENEIHYLQENLKSMEEIQGLTDLQLQEADEEKERILAQLRELEKKKKLEDAKSQEQVFGLDKELKKLKKAVATSDKLATAELTIAKDQLKSLHGTVMKINQERAEELQEAERFSRKAAQAARDLTRAEAEIELLQNLLRQKGEQFRLEMEKTGVGTGANSQVLEIEKLNETMERQRTEIARLQNVLDLTGSDNKGGFENVLEEIAELRREVSYQNDYISSMADPFKRRGYWYFMPPPPSSKVSSHSSQATKDSGVGLKYSASTPVRKPRPGQQDGKEGSQPPPASGYWVYSPIRSGLHKLFPSRDADSGGDSQEESELDDQEEPPFVPPPGYMMYTVLPDGSPVPQGMALYAPPPPLPNNSRPLTPGTVVYGPPPAGAPMVYGPPPPNFSIPFIPMGVLHCNVPEHHNLENEVSRLEDIMQHLKSKKREERWMRASKRQSEKEMEELHHNIDDLLQEKKSLECEVEELHRTVQKRQQQKDFIDGNVESLMTELEIEKSLKHHEDIVDEIECIEKTLLKRRSELREADRLLAEAESELSCTKEKTKNAVEKFTDAKRSLLQTESDAEELERRAQETAVNLVKADQQLRSLQADAKDLEQHKIKQEEILKEINKIVAAKDSDFQCLSKKKEKLTEELQKLQKDIEMAERNEDHHLQVLKESEVLLQAKRAELEKLKSQVTSQQQEMAVLDRQLGHKKEELHLLQGSMVQAKADLQEALRLGETEVTEKCNHIREVKSLLEELSFQKGELNVQISKTQLTLIKQEIEKEEENLQVVLRQMSKHKTELKNILDMLQLENHELQGLKLQHDQRVSELEKTQVAVLEEKLELENLQQISQQQKGEIEWQKQLLERDKREIERMTAESRALQSCVECLSKEKEDLQEKCDIWEKKLAQTKRVLAAAEENSKMEQSNLEKLELNVRKLQQELDQLNRDKLSLHNDISAMQQQLQEKREAVNSLQEELANVQDHLNLAKQDLLHTTKHQDVLLSEQTRLQKDISEWANRFEDCQKEEETKQQQLQVLQNEIEENKLKLVQQEMMFQRLQKERESEESKLETSKVTLKEQQHQLEKELTDQKSKLDQVLSKVLAAEERVRTLQEEERWCESLEKTLSQTKRQLSEQQLVEKSGELLALQKEADSMRADFSLLRNQFLTERKKAEKQVASLKEALKIQRSQLEKNLLEQKQENSCIQKEMATIELVAQDNHERARRLMKELNQMQYEYTELKKQMANQKDLERRQMEISDAMRTLKSEVKDEIRTSLKNLNQFLPELPADLEAIRNENLEGELESLKENLPFTMNEGPFEEKLNFSQVHIMDEHWRGEALREKLRHREDRLKAQLRHCMSKQAEVLIKGKRQTEGTLHSLRRQVDALGELVTSTSADSASSPSLSQLESSLTEDSQLGQNQVSSSS

SEQ ID NO: 1234 - DNA, 40227 bp, Mus musculus
  misc_feature (1)...(40227): n = A, C, G or T/U
taaaaaataaaaaataaatttttttaaagtagagagtacaaacatatttcaccgtgacataatagtggctaaggtgtggctcaactgagcaaatgttgcatttaggagacccagtgtccaatctaatttggaacacccccaaacaaattaccccaaaagaataaataatccaggagatagaggcacacacctttaatcccagcactagtagggcagagatagggggatctctgagttcgaggccagcctggtccacagactgaattctgggatggacagccagggccacacagagaaaccctgtctggaaaaacaaagcaaaacaaaacaaaacaacaacaacaacaaaccaaataaactcataaaaaaacaacgcattgtatacatctctttgtaggcaagccatctataaccagttatgaaacaaacaaactcaaatactgactaatactcagtgacattaaataaagacttttggggctagagcgatgatggttcagtagttaagaacaagtttggttcccagcacccagatcaggcatcttacaaccacctgtaactctggctttctggggatgtgacacctctggccttcacagacacctgcactcacatgatgtagccacatacagaagacacaggcacgcacacacgtagatatgcacgtccttataagtaaatttcaaaaatattttaaaaggatggttcattttgtataaagacatcataattctttaaaaatgatggcaataatcattactggaatatatacaaaggacatagatccttgcaaccaaggacagaggaaaaatttgagaggagtttgtgagccccgtaggaagagagttgcatgtattaagatggcattttcctgtgtttgcaaaaggggatgggctcaaaacaaaacaaaaaccccaccccaagacgagaaggtattggcaactgatggctgctggtagagaaagcttccattaaatgactccagaggagctacccacactccagtggatggtcccccacacccatccatacacacagccctaaatagactcaatgggtttaagaacacaggaagttgggggtggaagagggtagaagaggaaatggaggggagagattgaagggtagacttgatcaaaacatatggactggggatgttggcacaaacctttaatcccagcattcgggatgcaaaggaacgtggatttctatatgtgtttcaggccagttgaggctataaagtgggacctagtgtaaataaaacacacaaacaaaaacccatatatgtgtgtgtgtgtgtgtatacatacatacatatatacacacacatacatatacatatatatacacacacatatatatgcacatacatacatacatacatacatacatatatatgttgtaaaaaggtctggagatggttcagcgattaagagcactgactgctcttccagagatcctgagctcaattcccagctcacaaccatctgtaatgggatccaatgtggtcttctggtgtgtctgaagacagcaacagtatataaatatgtgtgtgtgtgtgtgtgtgtgtgtgtgtgtgtgtgtgtgtgtgtgtgtgtaagatctttaatttaaaagttgtaaaaactttcttacataaagataaattcaacttaaaaataaataaaaattaagtgcttgtttttcacctagctttattgagaatgcaggtgacacgcagggaaagcagcaggggaaaagatattcattggtatctgtgctttaaggcaactcagcaacgctgatagaaccatacacgtgtcttgtgatccagcagtctactcctagggatttctctcatagacgatatggtacataatgtctaatttgttttcatacacaatttctcactgtttttagaatagaaaattcttgaagacaaatccttaacagaaaggcactgggaaatttcagttcatttgtgacacagaaggctggagtctctgagtcagagagaagctgctgtctgttgagagctgtcttcagggattctaagggcaaaacaaagatagacacgcaaaaataaatggaggggcacattgatttttcactctaaaccccatttttatccttatgagccttcaattatatagatgtatcacctgtttgtggtagtttaaatgagaatggatcctataaggtcatatatttgaatgattaattatccattggtggaactgtttgggaaggattagaaagtgtggccttgttggatgaggtgtagcttcattggaggaaaaatgtcacctctccctctctctctctctctctctctctctctctctctctctctctctctctctctcactgctgcctgacgatcgggatgtaaaactctcagttactcctcttctttccatgatgaccatgggctaaccctctagaactctaagaaccccacccccaccccccacttttataaaatgctttcttttataaaagttaccttgggacatggtgtcttgttactgcaatagaagttactaagactcctttcaaataagttaaaatgtagatatctgggagatgctaagttggatgactaatttgcaggagacttaacacagagatttgctaataaagagaaacagaagtatcaaaaaccaagagcgaaggcacattgtttgcttgctcaacatgaaaaggggcctttggaggaccagaggtctagtcataagcaagaatccccagacccagaaatccaccctggactccctgtaaccaagaaaaaccttcacagtctccaactaaggactagaaagatgttttctccataaaatggagaaatggtggccccctgcatcccaccacccaaaggtcacatatggagaaacaacagagaaagtctacaaacaaagcctaaatacacagacttaatttccatctggagattttcctttaacagggagggaaagggggcctccccacgggtgatctgcaccagtggaccagatcactgggccacacaaaaagtcaggtattggtcttcagaaggctggtgtctttcagcctttcaggctttctctccagttctcctttctccccccacccctccatctctttactcctccccatcctctcccctcatcccaatctggctgccattggattcctttccacagtcttagactctgagcctttctgacccgtgagagaggcatgtatccctttgatgtgtcgatattaccatccactgtgactcagggagcgctcttccttggtggtcctgtctgggtgttttatagagatgtctcggtattacttctcagattcttgacggatgtttccaattccttcacaatgacgaagactggatgaagaaaaaaaactaattccaagcttccatctatttctctaccatcttgctttgttttttcctaactgtacaactggataaagaaaatttgtcttatgggatgtgaaaaacatgagatgactgcagaaatcaacattttcacagatcttccatgatctacaaacaagcaattagtatcttctaattaaaattgtcggttggccctaaggccttgaggaaagaaaattgtgtgtgtgtgtgtgtgtgtatatatatatatatatatatatatatatatatatatatatattcttcattatttatcttaaaagattggctaactttataacatatgtctttcctgcacaaagttgagatgtgcttaatggcaggggaaatcccttgtatgcagagtttctgatggtgtggtgactgagacggaagatcagtacatacatgtccatattaacagtggccttttgattcaggtccagtgaatggagaaaaagataatttgtttgttttgtttaagagtactagaaattcaactgggtgtgtggcttgtgccttataattccagtaccggggaggctgaggcagagggattgccacatagttgatgctagcctgggctataaaatgagttccatactagcatgagctacagagtagggctctgtctcctgtctcaaacaaaaaagagtgtgtgtgcgtggggcagggagtgctgtgggaataaaagaagtggggggaaacctgtaacccaccagaattccagtgctctgggcaggcagatgcggaaggactgacgcatgctttccacatggccccccgtgggtgtctggctgtgtgaagccatggaccccagctaggcaggtggtggacaaggacctctggacaccgagaaagaactgagaatagaatgtggggcccgggggcggctcataagccctggggccaaagggaggagagggcagggggagagggaggtgctgggtggttcccacgaaggcaagagtccttggtccggtctgtggctggagcgcaggaaggccttccagtgggaggttagacgctgctcattagggaaaagcctattccatcattcaagcatggcgggccttgatgagcaaagacagtctatggttttagagctttattgtagaaaggcagagggaaggagagaagggagagagagagaggctggccattgccacaaggggagaggagggaagagagagagaaaaggacggctagacaggagagtaagaaagggtgagagcttaaagagagcaaggaggtccaagcagccccttttataatgggctgggctaccttgctgttgcaggtaactatggggaggaacatacctggctatagtcaggtaactgtgggggtggagtctagccaaaatgccataagcttggaacattgtcttcgtgacttatggtcacagaattatggatttgggggctctgcggtgtcaggtacctgactctggaaactcactgttctatcccttgtagttttctactgggccgctgaaacaagcctcattcaaccaaaataggttacctatcacagtcgcacatgtgtgtaatggccaggtggggttggggggagggggaaggaaatggctcagtcattaaagtcnnnnnnnnnnnnnnnnnnnnnnnnnnnnnnnnnnnnnnnnnnnnnnnnnnnnnnnnnnnnnnnnnnnnnnnnnnnnnnnnnnnnnnnnnnnnnnnnnnnnnnnnnnnnnnnnnnnnnnnnnnnnnnnnnnnnnnnnnnnnnnnnnnnnnnnnnnnnnnnnnnnnnnnnnnnnnnnnnnnnnnnnnnnnnnnnnnnnnnnnnnnnnnnnnnnnnnnnnnnnnnnnnnnnnnnnnnnnnnnnnnnnnnnnnnnnnnnnnnnnnnnnnnnnnnnnnnnnnnnnnnnnnnnnnnnnnnnnnnnnnnnnnnnnntgtgtgtatatgtatatatatatatatatatatatatatatatacacacacacatatatatatatatatatatatatatatatatatacatacatacacatacatacatatgcctggaattgtcagagaataaatattcttaattttaaaaataaaataatgtgaagagtatcagaggaagacaccctgcacaacctctggcctccacacctaacctcacaaacacactcacacagacgcacacatgcactcacacaaatacacagacagacagacagacagacagacagacacacacacacacacacacacacacacatacacatatacactggtcatacatttacaccaattaataaacaaaaagagcattagggattcaaagtatctctaggctctcacacagtggctcagcgggcagaagtgtttaccttcaagtatttttgagaacccgagttcattctctagggaatgaacatagtggaaggagagaactgattcccataggttgtcctctgatctccacacatacactgtgacacacacaaacacacacacacatatcaatcaatcaatcaatcaatcaagactgcagtcagcttacattttcatttcattcttttttttctttttattttttacattccatgctccattccctgtcctcccccccccccccaccctcagactgctcaacatcccacacctcctccccacaccaccccggcaccacgtggatgctcccaccccacctgacctctaaactccctggggcctctggtctcttgagggttagatgcatcatctctgaatgaacacagacatggaagtcctctactgtatgtgtattgggggcctcatatcagctggtgtatgctgtctgtttggaggtccagtgtttgagagatcccgggtccagattaattgaaactgctggtcctcctgcaaaattgcccttctcctcagcttcttagagccttccctaattcaacaacaggggtcggctgcttctgaccattgtttgggtgaaaatatctgcatctgattctttcagctgcttgttgtgtctttcagagggcagtcatggtagatctctttttgtgagtgctccatagcctcagtgatagtgtcaggccttgggacctccccttgagctggattccactttgggcctgttgctggaccttcttttcctcaggctcctctccatttccatttcattatttttaaaaagatgtctggaaggaaaggaaattccagtgtttaggagaaggtgaaagacatccaaacacacatgggcgtcgggagcccaggcattttactaacaggagacaggacctccaagctaccccagcatgggaatgcccactcttgtgggcatagtgttgcgtgcctaggatttctgacacagatgattcgtactttcagaacgtggcatgagatatacattgcgactaatgctaaggagaaggagcctagtgtaaaagtgatatgcgcactgcaacagtaaaagtgcctgagaagtgtagcaacatcaccgcacacacaaattaagagaagaaagtgctctcctgagagtgacgcctgattaatgtcattaacgttgtcctggcctttcatttaaaagtcaaagggctgtctggaaacctcggtgccctgagaatgcattttactaggctttcaacattactaagcacaattctaaaggcttcggtcctacaaggactactcctccactggagccacccacaccagggcctccttttaaaagaggtttataagcccactcatggataataacatgttgcttttcttctcaaaggctttcatccttacagaagttctagcagcatttttccaaagcaaataatgctgacttaagtcaaggaccacaacacagacctgggcttttgatgactaacttaaaggcagggcattggaagctctagggcttccactgccggggctgtgtaccaaggtgttcagaatggatgcatgactcctgctgcaggagcagagatgggcaagggagtgggaagagaccacccagaagtcaaagtgcaatggcctcgttttctcccccctctccctcccttttccacagttaagcaggtggtttgtctcttcatgggttaggactctcttttatagatcactttttagtcctgttataaacttttagtttattttctttttaggggtaaagaaaagaagcaagtggccatattacccattacaggctgagaagcccttatctgagatgctcagaacccaagtgtctagtttgtgctttttcaaatcttggaatccacacatgagatctctttggagatgggtcccaagtctaaacatgaaattcattgtgtgtcacatatacttgtaatcagagtcaaatctacacatgatgttccaacaattttatgcccatgaatacacacacacacacacacacacacacacacagagttaataaatataaatttttaaagaatttttaaaaaaatcaacaggtaataggctacttataaacaatctttcaacattttatagtacacatttgtcaactttttcaataagcagatatttatattatttactgagatgtattttcagatatagcaatatccatcatttttatagaaggtatatatgacctgtgattcatgcaaccaataatcaagatacagcatagctccacccccgcaaagtcccctcccactcctttgcagtttaacctctcttgtgtcctctgtggttggaactgattagattactgttcctgtcacttgaactccctcccttctcttctctaccgtgctagggactgaacaagcctcctatatgccatgcaagaactgtgacattgagcacttttgttttgttttgttttgttttgttttgttttgtttttaagtggtgagtggacacctctggggtccaaggagacctgtggagggtaccagaccccttggagctagagttacaggaggcacctggtgtggatgctgggaactgaactccagtcctctacaagagcagcatcctttgtggtttgtttgattgtttgattgtttgtttaagagcattgttcttaagagctgagccacctttccagtccttttgacttttattttgagacagggtcctgttaaatttctcaggccagccccaccacacttagtcgtatgtccctgcctcctcagagttaggattgcaggtgtgagtcatcacatccagcttgtatcatgtatgaaattatacagcaagcaacgtgatctatgttctgatttttttaatctagcatacttaatattgcatagtgtctttggggttcctctgtacagagcattcctactcctgagttgtatgttgttgtgtgcatgtaacacaagctgtttgtctactctgcatttaatgggctctggggttgtgtttaacttctttcactcttgaagagaagtactctagacatctgtacacagggttctgtgtataaaagtttttatttctcttagaattccctgcaatttgattattggttgcacaatatgtgctaagtatgttgaattgacttctaacattttactttttttgtattctcataaccatgtataaaagctcctattgctctaacatcatcattaacatttaggggttttgtttgtttgttttgttttgtttgtttttgagacagggtctctctacataggccagactggcctcgaactcacagagatccacctgcctctgcctcccaagtgctgggattaaaggcatatactgtcacgcctagtcgaagggcagtttttgatggaagaacagtttgtccaagtactgtctgctaaatgttggccctggaggtacagcaatatgctttaactcatacgttcttagcaaaaagttgcatctattggttaccatttcactatattaccaccgatatttctgcatcaatgagtattagttgaaacatgatttggaatatgcactacacagcattctcttgatcacatcttaatttagctaagcctctgcttggtgaatatttatagtagatgtgatgacaggtacatataattctaactctgaggaggtggagacaaaaagactaagtttggggctggcttgagaaacttaacaggaccctgtctcgaaatgaagtcaaaaggactggaaaggtggctcagttcttaagagccctgttttaaaacaaataaaacaatataagaaagaaaagaaatacataattactatacttgcacagaagtctctgtccacacctgcaattcttttcttagcatgagtgctcaacactgggaagcccttagaaaggaaaggtgctcacttgtattgtctcttagaaagactatagatgtcttaaagcaaagactctgtcttgtccattgtgacacccctggacgtgacaaggacctcacactggaacactgctcttaccagagagaagaatcgttgacgttaagaaagaattcatccagactggatcttctctacactctcctcagacctcactctgtcctgtaaacatctacctggctttcccaggctaacgaaagaagagaaggcttgccaaagagactcaggttccagggcagcttaatgatgagcctggttgttgctcagcaatgccctcaaggggccccgccccctgaagctataaagccttagtgaggtgagatgagccagttacaactggcactcagcctcagagcatcggcaaggcactggcacacaggcactatggcaaacgaagtacaagttctgccgtccccgctgaaagggcggtatgccccagcaggtaggttcccccacctgacctcgctcccaccgaaaaaggcttccacactccatctgagaggcatccatcctcccagaagtagtgttgctttaacttccagcagcccgagctcctccatggttgtagattagttgtgacccctcacctaggggttaccaccttggggagccctacctttctccaagatgcccatggttagctgacctcatactgacttccatgaagagaacagcagtaccccgtttctgcttcttgagtctttgggcttgggcaatgctctcaacccataaactgaggagcaggttttaataagcacccattgtctgcaggggctctaacaactagagagccttccttttttttttttttaaatccatgctattgacgtcaactctgtggactctagaaagtggttctcctgcaactaagcctatgtttacatagcttgactagcatgaacaggcctacttttagtcagttttacattcttccaactgctatccctctcccctggcatctcaaaagcctggctgctttgtccttgcctgtctccatttacaaatccagttatttgtataattctttgtcaggtctaagaggaggcggaggcctcttagctgctggcaggtaggacaggcacaggctttgcaaagggcaaggatctgatacagacccagagctttctagaaggcagcccagtagaatcagagtcttccggctcgttctacacaccatggccggtctgctttgccagtctacggacattccacacttgtagttggattcagcagtttttaatgttaaaattttaaaggttttgatgcaaacgagtctgggagcgaacgggcacgttgttggaagaggaactcatatattgcatggataaaaagaaatgccaccactctcttctgctgcctccactcccatccaactaaaaaatccgatttgctacagtacattcatgcacaaagttaaacttaaatgagagtttgaatgataccaccggggaacttcctgtccctgtcactaatgattgctaattgctctgtgtacagagcgcaccatgactctatcaagcatgtcacagtgcctctggcatgacaatgaattgttatgaactgtgacactgcagataagggctttgggataattgggatggagatgaaggcaggcttgctctcccactgagctccagagaacaaagaggtttcatccttcagctcgtcttcccccaaccaccatcaccttttttttttttttaatttaaagtctgaaccagttttcaatgatgcaaagttttatttatggaacaaaactaataagatgccaaaaattctattaagtcttcacctgatatttagaagcaaaatacagatgtctgacagcaggaagctaacgccatatggcgggaagggggaggcgtggccgtcagaaccggacaaggtcgagtttgaacttcacctttttttttttaacattttaaaaatttattttatttgtttacattccagccagccattgcccctcccccacctctcctggtcctcctcccacatttcctcaccccattcctcctcccccttgcctccaagagggtgcttaaacttcacttttaatctatctctctctctctgagcctccgttttcttacctctgaaaggggatactaaatgacatcaatctggtaaggctattgtgaggatgaaattgataatataaagtacctgacacttgaatggtgacccctttaaaacacaggcctgtaaggcccactggagtcggcagaatgatccttctggactcagatgtgggaggctcactggcacctgctgcaagggtccagacaggaaacaacctcagttggaaggcatgagtgcttgcagcttagttatgagtgacacctctcagaagtcagccagctggaactcccccacctatgcatggggtggggggcactccctttatgcgtactaatgtaatacatcacaccattgctatccttgattttgcatccgtgtcctgaaacaagacagtgttcattcatcaaaagtagcctggatctcctgcttttttgatttacctttctcttaggatgtttgtttgtttgtttgtttgtttgtttgggtaagggttggttttccgaaacagggtttctctttgtcttggctgtcttggaactcactctgtagaccaggcgggcttcgaactcagagatccatttacctttaggggtttgccaccaatgccagtctttttagttttagatgaactaaacattacacgaacatcaatagcaaatttttgtgagtggaaggtagtccaggcaagccagatgtgtggcgaacaggaagattagcagttgctcggaagctcatctccagtcctgccctttttaaactgattttaccccaaagcaggagagctgtatacagagattcagctgtgaaccacaagaggtgttttctggctcctttgggaaagaggaaaggttatggggaaggggtatcatgaagaactccgtaggtgaccataactgcctacggacatgtgtcacttaaaacaaaatggagggccaggaggatggggtcgtgcagtgagggaaggagacaggtaagaaacacaacataatatcatgtactcataaaaaggctataataagtagggggtgggggagatccactatatacaactgtcaaataatacataaaagatattctattaaaacaataaaaataagccatggcacagtggtgcatgcctttaatttcagatcgcagagggcaggcgcaggcagatttctgtacattcaagaacagcctggtctacagagagaatcccaggccagctgggactaaatagtgaggtcctttccctccacccccccccaaaattttaattttaaaaagacatgaaaactaaacagaaggacgtcttgactttcatcagtccaactggttaactcatgcagagtagggaggacggattaggagaggaagggagttagagtagggaggacggattggggagaggaagggagttagaagagaagcgtgtgagatcctctgcccaaaatacggaaggaagagcctggtgaacccacgggcagctgccattcggtcacccgtgcgctgcacacacagcataggaatttctagatatggcagcagcccttcagatagacggtgttctacagagaagcgccacaaaggagcaaactggaactcagagaggccaagagactgccctgaagccacccagccccgagactggaaaaataaaactggctttgagacaaaacttccttgctctaaaaatcctctttccctgagaatttttcagggctcttgattggcaaccaaaaattctctgagaaggcaacttgggagttgagccttctataagcttttgccttctagtgagattttcaaataagtttccagctataaggcagagtgtgcacaaactttgtgttttcttgctttcttagattacatcctccatggtcgagaggaggaaagggctcatttttcttacaggaagatttttgtcttgactgctctctaccaaatactgaaaaaaaaaaatcttaacaggaaattatgtagaatttgaaactacaagatctatctttgaaaaattacaaaccacaaaatctaccacaagagctcagctctaccccagaggcagaaagggaaagttccaatcctcctgcaccaactttggattcctaatgagacaacccaaaagaacatcttcttattagcatcttctcttgtagatgctaattcattcttctcaccaaacgtcctaaacatcttactgtgtttgtgttcaagtttgtacatatggttctttaaaatagtaagcccactcatgttttacttcgttgaattgcagttggttttacacaaagattctaaagaaactataccttgaataggaagctagagttgggtggaggtgcatctaagtttaaaagggctgatttagacacagtggcttcttgggaaagaccttccagccataggtgggttcaacaaaatgggccagggtgtgattgtcgtgggctatggtggtgatttatctagatcctgggagaccagggagaccagtgttcccagagaagccttgaagatgaccctcccacaaactggttccaactggttcattcaccacatgcttgtgagaacctccctcgataaatcaatatatccacccacagactggggatagcttgtgtgtcttgccacaaatcaaagtgtcttccctaaagattcctgttttattctttaacacgaagaacccctgcagtgtgggtttctagggtaccctttgctgtttgtctgtctgtgaagttgttatgttctttccaaagtgagacaagtaatggactttcttttcacagtagattagaaggtttagggtcacagtaagaatctcacggtgacgatgatggctgtttgctccatttcctctaagtcccccaaaattctcctaggatgctcaagacagaacaccctccgcaatacaccaagaggcattgaccaatgtaccaccaatgtacttccgcaccgaataacacaatctacttggaaaccttccttatctgatatccactctgccctctccttttggtacaacctaaaataagtctaaataagccaggcggtggtggtgcacacctttggtcccagcactagggaggcagaggcagtcagatctctgagtttgaagccagcctgattttacagagtgagttccaggatagccagagctacacagagataccctctctcaaaaagccaaaaatcaatcaatctatctaaataataannnnnnnnnnnnnnnnnnnnttttaaaaatctacattcatttatttatttatttattttttcccgagacagggtttctctgtatagccctggctgtcctggaactcactttgtagaccaggctgtcctggaactcagaaatctgcctgcctctgcctcctgagtgctgggattaaaggcgtgcaccaccatgcaggctctacatgtatttatacgtatgggttttactccctatagcacatgcgtgcacagagatcagaagacaatctgcaagcgtcagttctctccttctaccatgtgagtcctggggggtcagactctcaagctaggtggcaagcacctttacccactgagtcattcagccagtctggcttacgtatctttattcttaagaatacctctgaacaacgggattcattcctttttgagagatgtggaaaccacggcggaaagaaaactagatacttagctcacagtcattgtgtccatctgtctcattagcataatgagacacctcaggctaactctataaatcaaatgggcgtgtttagttctcagttctgaagatttactctctggtgaagactctgtggtaaaagagctagactcacccagcagaaggcaggaggaagatagactggggtccctatatcccttccaagggccactcccaactgaccgtagggtctcccaggaggccctacctcttaatacatcccgctcccattgtagtcacgctgaggaccagcttctcaggtcatcagacctttgaggacaactcaagccataggcagatcagagcagtctcatggctttgggggaatggagatgccctaatttgtccagcatttccttgggatcaccccaataggacacatgacccttcagaacgttggtgacggtactctcagtcgccctccagtggcctgactgactccacagctcctcctctaactgaaatgccttcctcctctctcggcaccctcctttagagtctctatgagtccttctaaatgaagtcaacatcgccaaacaatgatctaattaatgaaacacattaaggaaaaaaatatgaatatattcataaatgtggaggtgcatttgctgaaattcaatatttcttcaaataatagaatgatatagaatgatagtatcccctaaatgtgataaaaatgtataacatatgtgtatgtatgtagttaggtaaatatgaagagatggatacccaaagaatatattacatttcatagggaagcataagcctttaacaatgagaaaggcaaagatggtcacaatcaccactactgaacattttttctaaaggagatagatctataactctctgtaaattacatgtatttttttcacctggaaaagctaagagaatctatagaaagccaaaataagcaataatagaattcaccacatcctaaatgtaaaatcagttaagataaactcactggtgttcaattaattttttttcatctctaagttcttagtttgggcatgaaaaagagacctggcttacagaagtgcttatgaagtgtgagcctcagcataaatgtgtaaaactgacctgaacaaatttcgaagggactcggaggaggcaaacaatagaaagccatgtgtattctcaaacacagagccaccaggggtacaatgacatgaatctccccctttaaaaatatccataagtttatgcaggtgtggtggtgcacatctattatatatatttcttaaatatatatatatatatatatatatatatatatatacatatatatatatatatatataaaatatacatatacatacatacacacacatatatatgttttgtgtctaagaactcagtatgcaataaaggtgcatttcaaattgatagagaaaagactaattttcaaatgtagatcatctaaaaacacatcaaaccaggtgtggtggtgcacacctgtaactgcggcacactggaggtgaggcaggaggattggaagtttgaagccagcttgggctacacagggagtcctgggttcatagcaaaatctggtctcaacagcctcaaaacaaaacaaagatggacctgcctctgccacatgacttgcatcgaatatgtcattgaaggaccaaacacagaagtataaaaccagagtctggctttacaggatgaaaccaccgaacttctacaagacagcagagaatgcctgtaaaacatcacgttccttacaaatccgtatgagactgacaggtctacataagcgtgaagtttacaatgggcagacattatcaataagtaagaagaagagcagtaaatggtacaattaactattctacatttgcaatgcatttcacaaacagctcttaaaattaagtaagaaagggatgaaaaaagactagtagtcctacagggtgggggaaaactgggcagaaactatgaacagcccatcgaaacataaatacaaataccttctaaaggaagcttaagctgcaataacaaaacagaaatgcaaattagagcaatgagttactgtaacctggagttttaagacaaaagctttggctctgcagccccaagtagctaagtttggccattttccccaacgagttatttaaagccatatgtggtgatcaaaagcagagaggagatttggtcgatgtgtatgaggaagagaaacagacaaaggggtacaggacccccaacttcatcctccaagtcctgacttgaacgtaaagcttaagatttaatttttttatattaatgtatgtgtgtgttagatccccaggagctggggttacaggtgtctgtgagctcgcacgggttctgaaaaccaagccaattctcagaagttgggcaagcactcttaactgctgatccgttaggtttaaatacaagaagaaccaggacgggtaatgtggggtcatcttctctccctgaccaacccatctgcttccctcctcttctctatcacctacatgtagaactaagcaggtgacaccaatgaaaccaacagggagggaggtgggagggatgaaggcagggaggttgtgtctccagatacttacaggatccagggcaacttctccacatctattatagttctaactttttagcttactagttgataagatgaaacattttctagctcatcatctagagaaacaattgttgccaaggtagctgtggagactgtatgatttaacaaaatcccaaatgcgcctagtaaagtcacttctagaaatccatcccacagatagatagatagatagatagatagatagatagatagatagatagatagatagatagatgatagatagatagatagatagatagatagatagatgaatgatagatagatagatagatagatagatagatagatagatagatagacgtgtgctggtacagttacttataagaaggatactcgtggaagtcttgtttatgaacataatgaattggaaacacatgagatgcttagcattagcaaagtgactaagtaaacacagatgattttcataatagaattgaaaagaaagatagtaagaaaaaagcagacagatagaaatagtgaaatgttgaatgttctataaaatgaatggttggtaggggcgggtgtgtgtgtgtgtgtgtgtgtgtgtgcgtgtgtgtgtgtgtataaatcaaacatagaacagttagtatcttatgctaacatttaaaataatgtataagccatctgtgggtaaaggccaggaactgggaactagaggtattgggaagggtttcacaaatcttctcatgtttcttgactgcaccccttctgcatgtatgcctgatcaaaagagttaagtattaatatgtatatgaacagtgataaagtcagcacgcaaaagctctgagaaatcagtttcctcctttactttttaccttattggaattggttttagcaaaccgcccaagtggcgtttccataaagaggattagcaggttcaaacaaatcaacgtccacccgtccaccagagccacgtctcctccgagcttgtcagatttgagatgtgtgggttttttctggaaaaagaggaaggaatctgttttgacttgcagtctgaaatgggctgttcctttttcaactttgatttcggctgacattgttaaacactcgaattgcttttaggtcatctgtagcctaattaacataattgaactcttgaatggcatgcctattaatacagtttaattactcactaggatggccgagagctcagccagcatgcaggtttaggggtctgagaggaaggtggccagcctctggaattcaaagccccttgtttgaattaaacgtctgtcagcaccctgaaatttggctagtctctcagaatctggcttttgaaagcttcgttgaagaaacaaaaatgcaagctatgcgaaagctttaatcttgtgggaaaacaaagggtcacattgtaattatgggttgctatcttgaagaatgtaattggtttgataacaagagaaaaaaaatctttctgctaaatgcctaagggagtaggttgctattcttcctaaattcaggtgtgaccttctgcctttcaaccttgattccacctctctgagcataaaaaaatcaaagcccagaccttctcctccctgctctggcttccttagttgtttttttgttttgtttgtttgtttgttttggggggtcttttctgttgtttagataaatggtttttttttttctatgtagattcggaaacttgggtgtgagtcctgtctaagaaacaaggctgttctaacatgtatgctggtgggttttcttttttgtttgtttgtttccagtgaaagctggagggatgcgaatctccaaaaaacaagagatgggcgttttggaaagacacacgaaaaagacaggcttggagaaaacaaggtagggattgcttagagctctgcttccagaatgaaccaggaacaaaccaaaggccccaaggacttcaggggaggcagccaggcttctgtcctgttctgggctaccaacaggagtgttccaggggtcccctcacaccctacccactctcctctctgtggccacacaaatgcctccttctaaatggtcctaaatgcacctggccatgtcttaccattcacttacttaagaaactagtagccactgtgtactggttagttctctgtcaacttgacacaggctagagtaacttgggaaaagggaaactcagataagggaaatgctcccaccccacaggcctgtgggcaagcctgtggaacatagtctccattgatacaggatgacctagctcgctgcaggcagtcccacccctacattggtggttctgggttctctaagaaagaaggctgagcaagccatgaggagcaagccagcaagcagctctcctccatggcctctgcatcagttcctgcctccaggttcctaccatgcctgagtccctgtcctcagtgatgggctattacctggaagtatatgatggaataaacccttccctccccaagttgcttagggccacggtgttcctcagaacaatcacccaaagacttgcttaagggaaatgagtgcgtttggaaaagaaatggacatattggcctgattcctccaagtggcccaaggagggatgcttcagagatgggtttccatgggatactagtgagtcattcaaaaggagttgataaaaggatgttctgacatctgcttaagtctcacggggagaatgtagagggaaacatactatagttgctttgtccctttcaccttttatactgggctttttcatgggtgtgcatgaatggtgtgtgtgtgtgtgtgtgtgtgtgtgtgtgtgtgtgtgtgtacgtgcatgtccactcatgtagaggcccaaagttgacctcaggtgtctttctgaagcatgctctatttcattgagctcacttctttggctaatctagaaagccaatttgcccccaggctacactctggactggggcccgactgaaatctcctaccacacagcttggccagagagaagaaaggcagacacagacaatgtacaatattggaggctcactggtgaaagccaaggacagaactcacccatgcagcttgctttcagtaaactgattttccccaaaggtcactgaatcgacaagtgtttttagtttatggaaccataaactatatgcctttagtgtgtacacaatgcttcaatgaaaagattaaaaatcaattatagtagcaacctggtttacaaacttggtatgactcctgggtacatggagacagaacattgttctctacgtgttgctgagcaaagtaaaaatctacataaatcatttagtctctccagtagagattaaaaaaacaacataaaacatatatgctttatatattatatataatttattacatataatgtaatacatatgtatatatgtatgtatatagatagatagatagattgccttttgtttcttttgtttatcacaggctttctcagtagcttggacctcaccaaataggctaggttagctggccagccaggccctttctctgccttcccagtgctgggataacagatgtacacttccaaatctttctttctttcttcctttctttcttccttcctttctctctttctttctttctttctttctttctttctttctttctttctttctttccttccttccttccttccttccttccttccttacttacttattttctatagaccaaactcaatccttaggcttgcatactaaacacttactaagtgaatcatctctttagccccaaaagtaactgcgagggtgctgggattgagcctagggtcttgtgtatgtcaggtacacaactctaccaaccaccgagtctcatgcccagaggtttgcatcttatttaaagtttcttctcatcttcacagtgccatcacaaatgtcgccaagatacagatgttggatgctctgacggacacactggacaaggtgagccatgcccgaggcaacgcagacgacactctagctctgtctttacccagtggaccaagtggctcatgggagcctgcagttggccactgagattttgttccagcccatgagtttgatatccttgtaaggggggaaaaattgatctgttctcaggtagagaaatacaaactaagttaaaatgagaaagaaccgtttctccaaaagccttagtgcctctaaataaataatttcgaaacagggtaggggatgacgtgagagccacgatgctgagtgtgcagaacctttctttgccctcctaaatatttctcagggagactggcatgttttcacaaaaggcagcttgtgtgttgagactccagctgttttgtgggccttcctctgcacctctgcatctccacaggaaatactttgcagggatggtgggcacaggcctgagtgattgggggctggaagcagccaggcctcagctgggtttatcaagtaaagtacagttacaaggaagcttggctgctactatctttccttctagagcttgaatttcttccaagtagctcagacagctcaaaaaagagtcacactgggcagacagcaattagtagtttgggattctgagatggcctccttctctctgagccccaaactctgtaggtaaactctgtgcacccttattctattttcgggtgacaaacacatttatcctaacggtattaaagaaggctgctctctcttcgactcagccattaattgaaggatcagagctgcctctgtttaaagacttaaagttgtaagggagtgtccaccttctgtcccacacttgagcatttagtctgaaataaaccaacagacagattagtaggagaaaaggcctagaagtttattgcatgcccaggagctaggcaaggaagaaaagtgagtatccaatagcccatcacaaagcaggaacttccattcgcagcataaagggaaaggaagtggagaacatgagccatttaatgaagataaatcatttttagaggaccaaatgggccagagaaatagctgacagtttgcagctaagtctgctctctgctctgggtgtgggtcaattcttgtctcccttcctgagatctgcatcagtttcttggttgatagacgtgggaaagaggttcacaggagctgacagtcttcaaaaggttctggcctttgggcaggaagaggagcttctgcaccagctgcccatgaggcattctctgtgtccgtgtgtcaaagggctaggctttgaagtattgtgttgccaaaaccgggatctgggatcttcagcttagctctagaaaaagagcagaagctgtgtggctgcccttgagaaaagatttgtgtgtgtgtgtgtgtgtgnnnnnnnnnnnnnnnnnnnntgtgtgtgtgtgtgtgtgtgtgtgtgtgtgtgtatctgtgtgtgtgtatctgtgtgtgtgttgcctgtctatctgtctgtgtgtccatgtgtctgtgtgagcatatgtgcatgcgcacagagaccattaagagggtatcagacaccctctatctctttccacctgctcctttttgagacagctatctcaatgtagaggacatagcggtacatgcctttattcccagcacttgggaaatggaggccggtggatctctgtaagtttgagaccatcctggtctacatagctagttccaaatgttcaggactacatagacaaaacaaaccaacaaaccaacctcaagtagagctacacacctcttttgatgttttcaccagtgttaaagtggttcctcacccatactctatgctgccatgaggacctaagagttgctcaaaagaaatatagcagcataactgaagatcgtattttagcattctttcccactttcagctaattatgtctagtcccaggaacccatgatatttctgatcttgattttggaactgtaatagtctaagatgaacacttcctataaggcctcatcaaccaatcagtcatgacaagacgtttccactggcctaccaacctagggtttgagacttgggaggttgaaaacactccccaaggggttgagacaggattaatctatgtgaggagcagcctgagctctctcctccccctattttcccaaacagactcctttcttcttccccaccctgcttctcctccttccctacctctccatccctacacagaaggtttgccttgtccggtggctgcacacatagcctggtctctctgtagacaagcatcagacaacccgaatgctctctgtgctaacctctggaggcatggtcttgaccaacttctactggccactttcaaaagcaacttaacttttaggctgtcctgtagttcctccaagttttgtggtctatcgagtactttaaacttttttatttttaagacgacaaagggtgggggaagataccgagttgtgttctcaacacataaaggtatctggttaaacattaaaaatggtgttatgtaaaggtatggtattagaatctaattaaaggggttttttttctcctttctctgtttgtaaagacttttaaaagacttttcctttcctttttaaaagactttttccaagttgccaggcattgggtcatcccctggccaaagttgcacagctgcctgtgaaatgggatccttaggaaggaacctatcacaggcatctgtacaatcaggagggttcttcttgttccacagactagcctctccatgggagtgcccttgaatgtcactgacgtgaagcgtacgtattgctttaagtgcttggcttaacggggtgtggaaatgtaagtgccaacattggagctggaacttaccagcttgggaagatgaatggaggcactggcatctgctcagaccagcatgcttcaggctcaaacgcagaacccgcccctgatctctctgcacctagagcttatttcagagctccgcgcagacagactttgatcagaattgttatgctgttttccctgaaactaaaaatggaggttttgagcccaggggtgtctacagggaaggaaggcagcacaagactttctcttgatctgtttttcacgtcacccctgtaatggagccataagatagaatacacacacacacacacacaccaatcttgaattcttcctcatgttctgttagacaccattacattggtgactcagacaagaaacaagttttactctactaaaactgtcactttaccatgactgataattaaaattacagaactttcccagctcaagattctagccgaaataattaagcttctagggccagtaccattttggcttccgcatgtcctgtgactcaaagcacacagtgttttctgcaataaagtatgctgtcaagttctggaggataaccaagagcaatgtcaaaagccaatgtttgatgatctatgggaccctgctggccaagaaccctaaaagaggtaatccactcttggcactggggtttttattcactagtctgtagtgtttaagtaggggcatccattccccttaccccactacaggataactctacttaaactctgtatatgtatgtgtataggaaaactctatatcagcaagtttctttatgactttttcaaatgatctttagtgttagtcacctctccttaaattcccccttctaccctgctggcccactcctcatcctatttaactctctctgttccattactcctctttgaccctttatgtcactgtattctatttctctcccttgaaagacctcctctgggctccatagtagtttcctgacctcgatggtattctaaatgaactacacttacataacaatgcagagccaacatccacatatgagagaaaacctgtaatgtgtctttctgggtctggactaccttactgtggatgattattgctagctccattaatttatctgtatactttaccattttgtttttaagaggtgagtaagacaccgttgggtaaatgcaccacactgtccttcatgcagccatcaggtgaggacatccatttcctggctattgtaaatacagcatcaatgagcctaggtaagcaagtacgtctgtagtagcatgcagcatcctttgggtagatgcccaagaacagtatggctgggctgaagggcagatctattcagagattttagaggaatctccatactgagttcctcagtggctgtaccagtttgcactcccacaagtactgtacaagtgtccccatttcccctccagacacaccagcatttgttgtctttttttttttctttttttaaatcttagccattctgactgctaaaatggaatctcaaacttgttttgatttgtatttccctggtggcttaaaaagaatattgagctgggtgtggtggcgcatgcctttaatcccagcacttgggaggcagaagcaggcagatttctgagttccaggacagcctggtctacaaagtgagttccaggacagccagagctacacagagaaaccctgtctcgaaaaacaaaaacaaaaaaagaaaaaaaaattgaacatttaaaagtatatttcttgctgggcagtgatggtgcatgcctttaatcccagcagttgggaggcagaggcaggcggatttctgagtttgagcccagcctggtctacagagtgagttccaggacagccagagctatacagaaaaaccctgcctgaataaataaataaataaataaataaataaataaataaataaataaaatatatttcttagccatctgctaagggtttctttgtatagcctcagctatcccagaactctctgtagactaggatagcctcaaactcatttcttaaataattaagcatgcaattgcatatggtcttacaattcttttcctgtgcacacacacacacacacacatttcaaagtagggacttgagcagacatttggacagcaatgctcattgtaacattcccaagtgccagaaagtagaacggacccctccccaaatatctatggattcgtgaacagaaacgcaaaatgtggtataaaattcagtattgttcactttaaaacaaggaaattttgacaagcactctcacatgaacaaaccttgaatatatcatgttaactgaagtaagtaaagagaaatgtactgcctgaatcccacttatatgagatacctagaataatcagattcatagagacataataaaacagggttgccaaggacttgaagaactgtggagtgtgctggctgcttttatgtcaacttgacacaaaccagagtcgagtggaagaaggaacctcagttgagaaaatacccccactagagaggcctatgatgcatttcttagttgatgattgacgcgggagggcccagctcatgtggttggtgccacccctgggttagtggtcctgggtgctataagaaagcaggcttagcaagccagaaagagtaagtcagtaagcaggactctcccatggtctctctatctgtttctgtctccagggttcctgccctgactccctcggtgatagatttaccagaaggtatagagtgaaataattggtcacgtgttttatcactgtaatagaaactaactaagataaggaatattagttttctgtttggttggtgtttttggagacagggcttctctgtgtagccctggccatcatggaacttgctctgtagaccaggctggcctcaaactcacagagacccacctgcctctgcctccggagtgctgggactaaaggcggtcaggactgctgatcggctaaaggaatgttgtctaataggcactttgtttcagtttggggaccaagttccatgaagggatagtagtgctgattgtacaacaaaatgaacgcatttaatgttattgggctgtaaaacactttttaaaatggataaaatgatcaattttaccgtaaaatttaaaattaccccagagacaaagcccttccattttctagatcatctgggacacagataataacagtttagtgcccttgcactgccctccccttcctagcaccacccattgcctctcacaatggtgactggtggctttctctgtcccgttcctacttcctgccttggtcctcctcatctgactgaccgcccaaaccacagctcttctatcagaggcatccgttgtcttcttgctcacccctttgcctcacatttgaccttcagtaatcttccaggttgttgttcctgtctagaggtttatagtgtgattcaaagtcaacctgaaatagctcatctgtttcagatgaagctaaaaatgcccactctgaaaccaagccactaaagtcattgacttccaaaatttcccttggggtctaatgttaaaagaaaaacaaaacaaaacacttccccttaccatactgcaaaacacatatacactaatgataattactctgacgttaaaaaaaaaaagtcttttttaaatgttaaagcaactcttataaccaatattaaattactttgatcccttctggaatgtcagcaggagagaatccttggggttaattagtacataatgtatctgctcgttgtaaaaaaaaacaaagtaaaaaaatacttagaactaaagcactaagaatttccctgatcctatacctataggcagctttaacactgttgggtatagattgtgtgtgtgtgtgtgtgtgtgtgtgtgtgtgtgtgtgtgtgtagtgtctgtgtgtgtagtgtctgtgtgtatgtttatgtgtatagtgtgtgtatgtagtgtgtttatgtatgtatagtatgtgtatgtgtgtgtggtgtggtgtgtgtgtatatgtgtgtgtgtgtgtgtgtgtgtgtgtgtgtgtgtgtgtgtgtatacatgtgcatttaaagatcaagaagacttttcagagtcaggtttcacatgaaagttcctgctgtgtgcaatagctgggccaggggtgtttgagaagagctgtaaggcacatgttttccctagtttagaagaacccagtgcaaccataaacaatgtgctcctcagggtcataacagtttatccgcttttatttagtttgagtatcaaagcaagggcgttcaaattcaatagtgataaattcaatgctagcaagccacggccccacttcctggctggctaacagcccggtcttgaggtaccttgggacactattgatgagcttgaaaacgcaaaactgaacaggcccaaaggtcactgagttcgaactcttcctaggaagagtgtgtgcatcactcagcagctccgaagccctctcatcttaagcatcactggatgtaaatctcacaggacctttggtcaaaagcaaatatctgttactggcagcaagtctcccggcatgtaagcccacttcctcacagccaagtcatgagaatcattttcacctgcagctagttgcttttcaatgttccttcaccaagctgtttagtggactgggaggaatggccaacatcagactctttactgaaaaagagttacaatttcagatgtgctgccctaacacgtaaactgacactttgtaacttctttcaagggctctttttctcctgattgttagataattaattgaagaatccacccccccttcccaaacctcttaatacctccccatgcttggtagaatataacgatctattccacacgctaatgctagaatcactcttactttacagagcatggacacaggtaatgcttcaccatttctgcttttcaaaatgggacctcagagcaaatatatagcatggggtgacggcacaggtttctgatcccagcccttagaaggctgaggctggagggtcatgagttcaaggccagcctagactttgacttatatatgtcatatactcttatgatgatgaaaggtaaagacacattagtgaaggaaacagtgtatcacacaaacacactcccctccatagcctgaggatgggcagtgctgtggaaggagggtcttggggaaggaaggtcttatctaagaagtagagactgcgacttgaccagtggacccagtggatccgatatgcttatttcttctccctcttcaccttcagctcaaccataaatttccagcgacagttcacacggcacatcaaaagcccacacccgctctggagaaggctgctccaatgaagagggcctacattattcagcaacctcgaaaatgttagaccaggacagaaaacacagccacctggtcaactctcccacaatctgacagctcaggaaaaaaaaaaaaaaaaaaagaaaaaagaaaaggtcaatacttcctgtaggcctgctgcccttgcttggtaaataaaccaacttttgtatcttcccttttccctttagataataaagtttccaaaattatgaatccaatacatacctgtgctccttttgttatgtatgtatgtatcgggatcctaccggaactctctatgtaattctgcagcatgtgagagtgatccagaacacataactagtccatctaccacagtagttactaaggagagtgggccctgcacctcatctgggtatcatagtaatgctgggtaaactgactgtaaggacatgagtgtgggagagctggccctgccacttgtctgctatttggtgacatagtcaaggaagagataccccccacaccttgccccttgccacctatggcaggcaggagagctggccctgaggtcatcagagcaggagagctggcctagcccacaactgctcaacacctgggagaacagccgtgtacctcttttgagctcagggtagagctggcccaagagtgtaagaatgggagagctggtggactgaccagctcagatacctctcaggctcagatccagggctttgagttggcctacccaacatctatcccattgatgaactgctaaagtgcatgaaggggctggtcctgtagatccaaaactataggatctccatgacacagggcaacaacaaggatctctgagaggagtcccagagaggttccaatattgatagagtagcagaagccagaggcctagtaccagactcaatgcaatgaacatttgcaagcatagaagtatagaccaaagggtatactgtgggacacactgacacactacagcttccacaatgagatttgttttctctgttgggggtaagctgcaagagcagagagggcaggtatgaagggagggggaagtgagtgggattggggtgccccatgtgaaattcacaaagagtcaatacaaagtttttttaaaaaggaaaagaaaattaatttgaggcaatatcaagctttcagtcaatatcaacatgcatccataaaatagtcctaaccactccaccctggcttagcccagttcccagtactctgagccaatgtcaggaaattctaagatttaggagacagggttctgcttctgtcccttgctggttctaaaaccttaaactagctacttaccctctgtgaccgtcgtcaaatggatgcaatcacacatgtctcccgcagcagaaaccttcaagataaagtgactgctaagactcatcaaagctacttaagagtagtgagcatacagtagaagctccagcctgagaatgctaagagatgaacagcaaaggatgaagctcaatgtaaagaatccagggggatgccaaggatttgggtctgaagggaagaacatggggtgcataagagaaatgacaagagggtcctgtcacccaaggggtatgagacaagaggaagggcatcgttctctctgtccagagatgaaggacatcttagtcagggtttactgctgtgaacagacaccatgaccaaggcaagtcttacaaggacaacatttaattggagctggtttacaggttcagaggttcagtccattatcatcaaggtaagagcatggcagcatccaggcaggcatggtgcagaaggaactgagaattccacatcttcatctgaaggttgctagcagaatattggcttccaggcagctaggatgagggacttaaagcccacacccacagtgacaaacctactccaacaaggctacaccttctagtaggctgaggatacacaaaccataacaaaggttatgccaagatggagaatgctcaaaagcatgcgacacagtgaggacaaaggcattattaattcacattcacaagtgagttattagctacacaccaccggaagcatcaaatctggtgtgacctttagatctgaacagatactggaattatcagaagaaaaaggaccagacctatgaaagagtctgttgttttgttttgttttgttttgtttaaaaaaaagcccagcctttgattttaccaatgaagacttaggagccagatgctggggtgaaaacctgcgagctcggagaggcagagaaagcacccagctgaccttcctgttacactaacatcccagaaggagaacgcccactctccttctcaacactgtcttaaatacccttcaactcaaagaccctcctttctcttcgcttatgtctgctccctgttagctggttgcttgctctgcctcttgacctaagtttgattttatttagctcttgtgttaaagacgtgtgctaaggctgagccacaccacaacaagtttttcccagttcacaagcttggggttcacagtgtgatcaagtatcctgcaacaagagtcagtcccacagtgatagggccatgcatgcgtacaggcaaggggacttctctatcacccagggaggacaattcttcatggatgctctgtgacttccctcaggagctcctgctgtcagtttccagacagactcacagcagttagaaaggggtatcaccaggctggggatttcctggtagacagtcccttcggattactttaggtcaatagaacactctgggttcaaagataagagtaagaaactttccctgccaccaggagctcccaggacagtgatagagccatggctgtacatcaatagaaagcaagggttggtgcgtgttttaggaaaggatgttatgaatgaagctcacgaaatctcttaaaggtcatgttcaatcgagaaaaccatggtgcctgtgcagaccagtataagccatgtctaggaagttagtaaaacactttagttacactatacttttagaaataacatactgaaacactgctagagttcactatacttctgtactgaaattttcaaacttcctcaaagcttaggccaatatagctattgaaccttcatgtgttcattacagagctccgacaatgtgaccagtattgtttgcaccacgacacccagctcctttccttcctcctgggttatttcatagcatgcttcaaatacacaatctcctctagccatgtttcagtatgttatttctaaaggatgagtgtctcttcccttccctctttccccatttctttgtctctgccctatacttagacaaggcttttcacgaagactatggaatagaagatagtatttttgtaaaccatcaggaatcctttaccataaaatggtgattgctgttgctacgctcaactacaagagccaaaccaagcaatcggaagacacagggctgagcccagcccatgacactggagctgcatcggggagagtgaaggatggaagatggctttcagacaggaggagtgagcaaaggatatgagaggttgcagtacgtgaactagaaggatggaaagaaagccggagaaaaggaattcttgctgaaaagaataaagagccacatctgaggcctctcaaaaacccagggttggaatagacaccaaagtaaacaaatgaatggtggataaaactgtattcgctctgcacatacttggatggcggtctgtatgaactgtgatcttcagaaggggcccaagagcaagccttgcatctggcttttgtggagtttgaaacactaacatctctatgtcagctggagtcactacccacttctgaatagatatgattacctcccatccacccatgtgaccctcttacacacatacacacatctaacacacacatacacatacacacacatccatcacatgtgcagtggaagctcaaaatgtcctcaagaaggctgggaattcccagtagtcacctctgattgatgataaattttttcattgctttctgcccctgtctaccaccctattctagatgcctagttttttgtgctgtctgtcccacagtcttcctgtccttcttcttctcatctccccgactcgagccaaatcagccatcagctatttcttgggtacttcagagagtcgctttatcccaacatagcttgccagccccaacaagtttgccatcaactgtcaggacgttatgatggcatccaaatatgacagagtagctaagtgatgaataattaattagaaaacgtgaaatgacagaacataagccaagggaaatgagaggttgagagaaaaagagcagaaaattttcaaagaaatagccaaggcctgagagaaaaataagcctctggaaggctaagtggtctctgaggttaggtgggggagtttctctgggcatgccttagcctcaagtctgcagtggcctcttccatcccataagaacaaaggcgagggaggaagctgagaattctccaaatagacaggctccgctgtaattttgacaagaaacagaactgaatttgaagaaagaaatctttgagtgaaaagactggctggggaagtaaccaaattcccccacagggcaagagccgcacaagctcgggcttctagtgttttgttgaaaaggtgcaggttggaagctgaaagatcatgaaagtgaacaggagttaggcagggggggggggagatccaatgcactgatgtgagccctcaaagggacccagaaagataaagggaagtttgaacaagatcccttgcctgtgtacagcagaaggcttgagccagggagacgaaccaggcacagaggagacaaagagtcacctcttcattaaagcctacatcttcagactgcaaggtatagtgaccaaatgtagagtttcaaaacaatcaataattataacgatgtagtttgggtgacaccggacctcaggtacagatgggctctggagatgtcaaccccacagggcacaatatgccaccgttaccaagatcagaagctgatgagaaaacgagcaaacttcacaagactttaaatatgaaacatgagacttgattcatcacgaccttgctaaagtcaagaagctacccatatcagccggcatcttacctgtgttatttattataaataaaatcacttgggtcaataccaggagaattttttcctttaaaagaaaggtccattagtcactcaagtatagattaactgggggggggggcggacatacgtatagtaaggcatctatctgtaatcccagaactcaggagggtggaggagggtagcatattcaaagccagcctgtgctacacagcaagacctttgctcaggaaataaaacacaaaacaaacaacaaaaagtaccatttaagagagcagatggaaagtaagaggctgtgtcacttctattcatgtgctagcgggggttaaaattaatttcttaaagcatagaaaaccaaggaaaggagtggagccgggaagcctgcttccctttaaaactgcagaatagtgaaacatttttagtgtcataaagagagctttccaaaggaatatagccagaggctttcaagactaaagcagatattgctgcaaatgcatttaacagaaagcatgaggaagaaaaatgaaggtgaggaccctgggggtagaaacagcaaaatcaaagaacggatgcaaacagagtcggggaaatgagagcagaaggtcactcaagaacaaaaccattcctgctgacagcctttgcccaggaagagagtgctgctacactgttacaatgggcagaacaagaaggcagccaaagatggagatatcggaagggaagatttaactcggtgcaagggagcccaagtgcggagcttggctgtagcctgacatgaaacaagcagtctgaggccggtcaagcggctctggtccagctggctttcaaagcagggaagcgctctcagacccgcagatgtcctgtttagctgtgccaggcaggccctgaaaataaaggcaaaggaggggacatatggaactggtgataatatttcccaacaaagagaagatgggcacataccatccattttaaataacatggctggttgattgattgattgattgattgattgattgagagttttatacatgtagacatatccttatcttccccaactctcctgctgaactccccagactcgtccccaaacaccccttcccaccttcatagcttagttttaacccactaaatcaaacaaatgctggtggcttatgcaggagatttaaggaggccaacctctgtcggacacctctccccaggagaggaggtgccaaaggaggtggtgtttctgagcccctcccccacccgtgatagaccacagatgggtcctactttgtcaggtgatcacaactgctatgacttcatgagagcaatgaccatgtcatgtctggaaacagtagttcataggactcctccccgcgacctcccaccctccccctgccccccagcttttactttgtttccatccgttctgatcccaaaatgaaccttggaggacttgacataggtgcccgtttacgtttagtggtcagctgtcacttactctcacactctgaccagcttctacatttgactgctttccccactacacaaagcaacttctctctccctcagcctcttcagcgtgtgtgtgtgtgtgtgtgtgtgtgtgtgtgtgtgtgtgtgtgtgtgtgtgtgtgtgtgtgttttggaggatacaggatgatggctaagatgcattggaaaattactgtgtgcaagaggctgcccactatatccagtctctgacatttacaccacttgctcctgtggactgacaatcctgctctttctctgcggctgcaaagatttgcattagatatttttaaggtagccacggtaacatcacatataatatgtaaaatccgacctgtggagtcaggtctggtgctgtttacctttaatctcagccctgggaaggcagacgcaggcagatctctaagtttgaggccagcttggtctacaaagggagttccaggacagccagggctatacagagaaaccctccctgtcttgaaattaattcatgaagaaacaacaaataaaaggatattaagactggtccacaaatatccatagtactgctcttcataataagcccaaattggaaacatctcatatatccatcatggttaaataacctgccgcctccccttgcagtggaatattatttgacaatgaaaacaactgagggacttgggatatacatgcttagtatacacagggccccaggtatgattccagcaccaaatgaacaaatcccaaaaaaaacaaacaaacgaacagacaaagctgaagtaccgacatgtccggttcacagatgctgctgttgcttgaaagatgtcagtcacaaaggagcatgcacggtatccagaccaaatgtccaccacaggcaggtcctcagaagcaggaaacaagtgagtggtggctgagttcagggtggaagttagagcaactattttgtatttatttgttttaactttttattggttctttatgactttcccatcatgcaccccaacccctcccatccccctgtcccttctcatacctgccctctgcccttgcaacgtccccacaaaaagagaaaaaaaatgttgtggaatctgtagtgcgtgacagtgtgtcccacagtgtatccttttgtccacacttctttgcttgcaaatgttcattgcaacgagtccttggtctggttcgagaatagtggatcctcacaggggctcccctcagtcatcctgttgttgccccgtgtcatgaagatcctgtagtaattttttggggggtctgtaagactggccccttcacacgatgcagcagttcatggatggcgtggatgctgaggcagaccagctcgaagccctggatctgggcctgaaaggtgtctgagctggtcagcctgccagctcaacggaactcacaccacccaggtgagctctcctgccctgccctgcctggcccatccagtgcctcagctggcaggggcagaaccagcttatccactctcataccctcaggactggctcatctgtgcccacacccccagagacagctctactatgttgctcaggcgagatgcagcaggctaggagctaggccaagctctcctgctctcactcccttgaggccagcttaccagaaacccatacccaagctgagacagctctaccctgctccccaggtgaggtccagagcccaatctcccaactgttacaactggtgagggacagatccagttctcccactttcatggccctggggccagcagtcccacctgctatagtgtgtatgtgttattacaggatggctctccctagtccatgcgacagcacagcagacacaagacaaggctggctttccagcactcatgagcttggggccagctcacccgcaattccaacatctaggaacagctttactgtgctgcccaggtgagatgcaaggcccactttcctgaatgctgccactccttcccataatttcctccaatcagggacagctctactgtgcttcccgggtgatggaggtgaggggcagctgcctgaatactgcagcttgctagggatggggccagctcttctgctttcacgccccccccccaagtagttttttcagctacttgggagaccaaaaattcaagtgtagctggattctgcctcaaagttaatgttcttaaaatctatggatatggctgagttttagagttcttgcttcaaatacttgagacccagggttggatccccgtgtctaaaaaaaaaaaaaaaatcaaagaaagttgaacaaataaacatgattttcacccaagaatcatatctagcacaaaactctaacctcaatccacaaagaactgactaatgagggcaaaccatatccccagcagaatgaccaagtttgggtgtgttctgagaacaaagggcgtggggagaaacaagagtcagagggggaagccctaattcacaccaggtcacaagcccagccttggctgatgtatgttacccatcgctacctgccaagtctccacagggtttgtagaacagtatctgtcaatggcagaaccgtttttcctttcatttacccaaatggtgtctggcacttaagcatccgtggaatgtttctgaaatagtgttttcaataccagacagcacagtgctgtctctaggagtcaaagcaaccatgtgagcctctgggtctttggcacagctgtggagggagaggttacctctttctcttctttacagcttccaacatcatctgtctgcacatgtcttctctttctcaagctcagctacagttggaagaaacagagtccagcccctgaccgccctgaccatggtagccaatggagggaaacagacactcttggaacaaagtaccatttctatgtttaaattacttttaaacaaagtgtcattgaagaatcttctcccagttcccctgcagaaccgtgatgtgaatgtgggtgactttttcatttagaacttcagggagcggctggccgttggagatgaatggcttggtttgtagcaatgggaagtaagagagaaacatctaccggatttgagtaatgcacccatttgaggtgttgactaagctctatggtgacagctcactgatctccttgcccatggtggcagatagctccacagccattttgtacattaaagatgtcctgaagggcctcctgtttaggaagcatttgtttccacagagagactattgccctcggtgtgtaatcgtaaactcacaaagttgatgactgtagcgtggttagatccttaggaaattctgtgctggttaagatcattgtcagctggcagcatctagaagagatgagcctctaggtgtacctgtgagggactatctttctggttgatcaaggtaagaaaatcgaccctaactgggggctgcaccattccatagcttggggtcccagactacctaaaaaggagaaagtgaactgaatgttcatattcatctgtctctcattcctgaccagctgtcctgccataatgactcccccactgtgtgtgatgaactgtatcctctcaaaccctaagccaagataaaaacccctccccctccaaagtggctttctgttagatattttgtcacaatgactgatacaaaacaaaataagcttccagacataggaga

SEQ ID NO: 1235 - DNA, 524 bp, Mus musculus
ttacaactggcactcagcctcagagcatcggcaaggcactggcacacaggcactatggcaaacgaagtacaagttctgccgtccccgctgaaagggcggtatgccccagcagtgaaagctggagggatgcgaatctccaaaaaacaagagatgggcgttttggaaagacacacgaaaaagacaggcttggagaaaacaagtgccatcacaaatgtcgccaagatacagatgttggatgctctgacggacacactggacaagctcaaccataaatttccagcgacagttcacacggcacatcaaaagcccacacccgctctggagaaggctgctccaatgaagagggcctacattattcagcaacctcgaaaatgttagaccaggacagaaaacacagccacctggtcaactctcccacaatctgacagctcaggaaaaaaaaaaaaaaaaaaagaaaaaagaaaaggtcaatacttcctgtaggcctgctgcccttgcttggtaaataaaccaacttttgtatc

SEQ ID NO: 1236 - protein, 125 aa, Mus musculus
LQLALSLRASARHWHTGTMANEVQVLPSPLKGRYAPAVKAGGMRISKKQEMGVLERHTKKTGLEKTSAITNVAKIQMLDALTDTLDKLNHKFPATVHTAHQKPTPALEKAAPMKRAYIIQQPRKC

SEQ ID NO: 1237 - DNA, 40660 bp, Homo sapiens
tggtgaataataattcacagcaaagaaaattcaaataagtctgaagcattaaaagatattcactgtctcaaaaaaaataaaattaaaaaaataaataaactagccgggcatggtggtgtgtgctgatagtcccagttactcgagaggctgcagtgagaggatcaatggagccctggaggttgaggctgcagggagccatgaccatgcctctgcactccagcctgggtggcagagtgagaccctgtctcaaacaaacaaacaaacaaaagatattcaacaggctgagcacactggttcatgtctctaatccctgcactttgggaagccgaggctggaggactgcccgaggccagaagttcaagaccaacctcggcaacgtagcaagacctcatctctacaaataaataaataaataaataaataaataaataaataaataaatttaaaaattagctgggtgtgctggctttcacctgtagcactagctacaggggaggctgaggcgggagtattccttgaacccaggagttcaagattactgtgagctatgatcaccccactgctctagcctaagtgacagagtgagaaccacctctaaaaagatgttcaacctcactcatactcagagaagtgtagacaaaaacaaaattgaatactatttttcacctatcaacttgacaaagagcaagttggtaagacttggcaaattggtaacacttgggggaaaaaggcactcatttatttctggcaggaattgccctccaacatcaatagagagcaatttggcagtatcagtattacaaatacacatgtcttttgacacagcaatctatttttaggaatttagcttataaataaaatggcatacacaggcaaagttgtatttgtaaaagattattcactgcaacattatttatgggagtaaatgattagaaacaacttaaatcttcatcagaaagacactgatgaaataaattctgatccatccataacatggaagggtacagtcactaagtaattgcagagcttttatttctaatgaaggaagtgtcttcaagatattctataagtgaaaaaagttaggtacacaataatatatgtatatattaccatatgtgttataaaaattaaaaaacatgccgggcgcggtggctcacgcctgtaatcccagcactttgggaggctaaggcaggcggatcacaaggtcaggatcgagaccatcctggctaacatggtgaaacctcgtcccgtctctactaaaaatacaaaaaaaaattagccgggcgtggtggcgggcgcctgtagtcccagctgctcaggatgctgaggtaggagaatggcgtgaacccgggaggcggagctttgagcggagatcgcgccactgcactccagcctgggcaacagagtgagactctgtctcaaaaaaaaaaaaaattaaaaaacatatgtatgaatttctcctaaatgtatgaaatatcttaggaaaacttataactttggttgtccccaaagagtggacctggaggttggagagggaaaaaatcaattttcactatattcctttttgtatcttttgagttttgaatcatatgaatgtattactgaaacagggtatttccctgaccccttcaagggactcatgacaggggcgcctggtttactcagcctgccactcaactcctcacaggagggagcacgtgagcaaacaagatgtaaactggagtgcataagcactggaaccaccctaccacttcagcactggcaggagcaaactccgtgtaggccccacggcagcatccaggtgggtgcctgcgacccctgaagccccaaagggcatgttacattgctcttttagcactgccatccgcagactgcttaagtgtcaacagttcagcgggccctttccctttttgcgtgaggtggctgccctttgccagagcaggaaaagagccagtgtgacagccttttgtgtccacactcatggttcccaagctcttgtccagcatccaggaaaaatgaggtcacactaacaaattgaaggatggtaaacgtgggggattttattgccgaagaaagtggttctcagtgggaaggggagctgaaaaggggataggatggggtaggtaatcttcccctgaagtcctgctatctccagccagattattctctgaagttacgcctttgagctgtccctctgaagtcgacaacatccagccgtagtccccaatgtccagctgcttctcctctctgctggctgaatctggggtctttataggcagaggatggggtggggcagggccctgggtggtttaggaaaaggtaacattccagcgggaaaccagggatatacgttctcactttgggccaccgtttcaggcttttcagcttgaggatgaggttttccctagggacatgcccttttctgcctgaaatttctctgcctcctgtctccatcattacccattcaataaataaaaacgtaaaaatctttggagagattaaatgagatgaataatttgtaggagacttaacacagggctttgccaatagagagataaataataagtttatgattaaatggatgaatttgagggttttcccaacagtaggatgggacttacagagtgaagtggagtcatcatatcatgactacaagggcccagattcatgaaaagggatctccaggctccgaaattcaccgctgaaccctgagtggcaccaagagatggtgcccacaggcaagaatgtcttggtcttttaagcccaaggaccaagggaatgttttctccataatcactcccatgatcccaccacacacaccccacctataatacatataatggagaaacagcagagaaaatactgaatgaaatctaaagagaaagcaaacacttaaacaaatggatatagactaaaggaaaaaactagagtaaaaatgtctataaagactgcattttatataaatttccagctctagtttttcctttaacaggaaaggcagggagggtccttggcagagagaagagggaagcagttagtgaagtaaacactggtccaaaaaagtcacatcttggcccacaaaaggctggccctctttccaggtatgtctttcccatggcctagtctggctatggttggaattcatttcagaatctttgatacctgaaacatctcaacccatggaaagggtacaaaaccctgtaacagataacttactagcatccgctgctcagacagtatgctgtcctttagctgttttattagtggtgcattatacagcttcctggcatgacttttcagatgcccaatgcgggtttcaagctgctggacaataataaagactgggccgacaatggatcagtagcagcttctgatctttccactgccatcttgttatgttttacgactaatttacctctctttgtttccttttatggccttttcccacctgtaaaatggggtcagtaaattttggctttatagaagatgtggaaggtagggaattgcagaaatttgtgttttaactaatctcgagtgtatttctaaaagtaaagtgaactattattatcttccaattaagtttatttgcctcttggctccaacactcaccactaaaacttcaagaccccaaggcaagaaaaaatgtactcttcattgtttaccttgttatcaagattggctaacttctaaactgtgtttctatattcctgcacacagaattgtgattgttttgttgctgggggaatccctatacataaaagtgtctatctgcatgataactcggaagaaagatccttacacacctctccaaattattaatggattctttgtttcaggtccagcaaatggagagagaaaacaatgagtgctttctgctaaagaatactaggaattaaaaatgtcctcggatgaaaggaaaatcccagtgttttggagagagggaagagaaagacacactatatctaaaaaacagaccaaaaaagctggtaagcacagttttctccataatgtaactcccataataccgcaccccccaacacaccccacctagaaaacatataatggagaaacaacagagaaaatactgaatgaaatctgaagagaaagcaaagcacctaaacacatggatatagactacagggagaaactggagttaaaatgtctagacaggcactggaagctcagagacatcttacaaaacaggaggcaagatgctttggagagggctttctctaaaccacctgctatggtttgaatgtctcctccaaaactcatgttgaaactgaatcgtcaatatgccagtatggagaggtgaagactttaagaggtgaccatagggctctgctcttctgaacagattgatccattcatggattgataggttaatggggccaggtgcagcctgtaatcttaacactttgggaggatgaagagggatgatcacttgaactcaggaatttaagaccagcctggccaacatagagagacctcatctctactaaaaattttttaaagattatctgggcatggtggcacacatatgtagcctgcgctacttgagagaccaaggcttgagcccaggagttcgaaaccaacctgaccaacacggtgaaacccgtctttacaaaaatgataaaaattagccaggtgtggtggtgcacacctgtaatcccagctactcgagaggctgaggcaggaagatcacttgagcccaggagtttgaggctacagtgagccataatacagccactgcactccagcctggggaatagagcgagaccctgtctcaaaaaaagggttaatggttatcctgggaggggagctggtggctttataagaagtggaggagaggctgggcatggtggctcacacctgtaatcccagcactttgggagggccaaggtgggcagatcatctgaggtcaggagtttgaggagttcgagaccagcctggccaatatggtgaaaccccatctctactaaaaatacaaaagttagccaggcatggtggcacatgcctgtcatctcagctacttgggaggctgagccaggagaaactgcttgaacctaggaggcagaggttgcagtgagccaagatcatgccaatgcactgcagtctgggtgatagagtgagactctaaaaagaagtggaggagaaaccccgagtgagcaggttagctctgtgccgccttgggactcagcagagagtgggaccccaccagcaataaggctctcagcagatgcatgccctccaccttcgacttcttagcctccataactgaatactgttttttgtttgtttgttcttgttttgatacagggtctcactctatccctcaggcagtggcgagatcttggctctctgcaacctctgcctagtgatcctcctgccccagcctcctgagtacctggggctacaggcatgcgccaccacacctggctaaatttttgcatgttttgtagagatagggttttgtcacattgcacaggctggtctcaaactcctagactcaagcaatcctccagccttgacctcccaatgtactgggattacaggcatgagccaccatgcccagctgcttatttttataaattaccaagtttcaggtattctgttgtaagcaatagaaaacaaattaagacaccaccccaccacctaagagtcaccaccctcccagttagctttcttgcccctgatttctaacatagatttctcatactttcagaacttagcataaggtacagcatgtaactaatgttaagagaaaaaagaaaatataaaaattagatgcaccctgcaaatatacaggtgcatgaggaaggtaatgtctcccacatacaaattaaaagaagaaagtgcaatactacgatgaaagtgttgtatgattttaaaatatgattaatgttaaagcatcctttcattttaagacagaaagctctctggcaacctcaacgtcgtgagaatccattttactaggctttttgcattacaaagcacaatttcaaatactttggtcctagcatgaactgctctcctgttgcagttaactcgactgatgccatttttaaagtgagctttataagcccatttaaagagtaataacatgttgtcttctttccatgagactttcaccctgatggaagctccagtatgtccccagagtaaatcacttgggctccacttacctcacagtgtacaaaacaggcctgggcttttcatgacgaacataaagagaaggcaagggaagaccccaccccactttggggctgccctgtgctcctaagcacacacagagggagacagagttgggaccctgggcctcctccagtggaagcagaaagagtggcagggcaggaaggctgtgctgggcggggcccagaggaggccacattggcctcatttttgcttttgccacttaccttttaccatcaccctgtggataccactactcccgttcccttagatcagaattttccaacttggatttcaagagcacaaattctttcctcccttctttctttccttctttctttctttctttttctttctttctttctttctttctttctttctttctttctttctttctttctttctttctttctttctttctctctttctttctttctctctttctttctttctttctttctttctctctctctctctctctctctcttccttccttccttcctttctctctttctttcttatttatttattttgagataggccttgctatgttgccgttgaattcctgggctcaagcaatactcccaactcagcttccccaagtagctgggactccaggtgcacaacaccccaccaagccaagaacacaaattctagggggtttttgttggttggtttctgtttttgagacaggctctcagtctatcgcccaggctggaatgcagaggcatgatcttggctcactgcagccttgacctcctgggctcaagcaatcctcccaccccagcctcccaagtagctgggaccagaagcgtgtgccaccactcctggctaatttttgtattatattttttttagagatggggtttctccatgttgcccaggaggctggtctcttaacttctgggctcaagcaataggctggcctcagctgcccaaagtgctgggattacaggcgtgcaccaccaatcctggccctctaagggttttttttagggccatgagaacgaacgttttcatgatgaaaaatgctctgcggatgctgcctactaaatccccctggggagggtcacaatgtacatctgtgaactgaaggctttacatgcgaatgatgtgaaaagaaatcctgtttaacattacttcatggataaatcgagtatttgccccaaagaagccttctctgcttgggcatgcattatattctggtccaaccactcattcctccacatcacttaggctgtcctaggtgcaggctctcctaaggggtggttgccctttgatttcctccttgccttttgcactttcgcagcttatagatatagaagataaccaataaaatctggtaccaaacagtcacacatctaggctttatgctacctacctatgctgtccaataccagagtcacatgccacatgtagctattcctatttctattaattaaaactatttaattttaaataaattaaaaattcaatttttcagttgcaccagccacatttcaagtgctcaaatgaatgtgtggcttgtggctacaacactggtcagagcagatacaaacatttccatcttctcagaaatttctgaggaataatgccacaataaaccttgtcaatcatagaaggaattctgttaaccttctcatcatgtccatatccgcatgagaatgtgagatcgctgaaagcaagaatgagattttctcatctctgaaccccagctcctagtccagggccctgcaggaaaggccactcacaaaataactgctagatgatatgaatgtttcctctttgctcccaaaaatgtgccaacctttgtcgcaacactttaccatacttttccctcaaaaaaaacttttattagtttttatttatttaaaaagtaatacagaatactgaaagaagatttaaaaatccacatgtaatactcccacctacagaatgccactcttaacattttggagtatttacattcatttatttacaaacagattttttgtcatttgttgaggcatattttgcatatggtaaaattcacccttttaaggtgatgtgtgtatgacgtatgatgaatgtaacaaccactacaatcaagatacaaattatttccatcaccctcaaaaagtcacctcctcacctttgtaattaagccactctccccaaccgctctccagcaatcactgatccaatttctgttcctagggtttcaactgttcaagaatgtcatgtacatggaattatataggaagtagctttttttagtctgggttcttccattaaacgtgttgcttttgagattcatccatgtttccctttttattgctgagttatattctatgatatagatacaccacaatctgtttacccattctacagttgaacttcggagttgtttctaacttttggcaatcctgatagagctgttataaacatttgcacatagggttttgtgtgtacatatgttttcatcactcttgggagaattcctagcaattggattgttagtcatatatagtaagtgtatgttgaattttataagaaactgtcaaactgacttccagaacacctttgcttttttgcgtttcccccagcaatgtatgagagtttcagttgctctgcgtcttcaccagcattttgtattttcctttttttttttgtcttgagccatcctaatacatatgtagtggtattttattgtggctttaatttgcatttccctaatgactaatgatgtcgagcatctttttgtgtgattatgtgttgtcaatatccttactttgtaatgttttatttgaatcttttgcccatttttaattgggttgtctgctttcttattattgagttgtaagaattctttatacattctaaatgtcggtacttcatcagaaatgcattttacagatattttctcccagtttgtagcttgtttttattttcttaacagggtttttcgaagagcagacaactgctcttcaagttgttttttaactgtactgaagaacaaagaaatttttataaatatctgccacatgctaaacttttattggcgctggaattacaataatggctaagcttaaagttgtatttttcctttttagcaaaattggcattgattggtttcttgtctactttttcactatcttatcgttaatatttctacatcattaaatattatttgaaaacatgattgtaaggtatactctcacagtgatttcttgattcatcttaactatccctctgtatttggagatgtttatcttgattcccatcaatattttaaaaagaaaagaagcatatgattcccatccttgcgcagaaatctctgtatacatttccaattattttcttagtataaatgcttataattgcaaaaactgggacagaggcacaggactttgctctatacctgtctctttagaaagactacagatgtcctgaagcaaagagcttgtcttggcccccttgtcatgccagaatatgacaaaagcctgttacattgcaggtgcactatacacacttgagggatcaacggttggagagaaaaagaattccactgaactccatcctctccctttcctcctgtggaaaaaaaagaaagaaaagaatatcctgtctcctgcagacatctaccttgccttcccagatgaagggaagaagaaagtcttcttctaagagaaaacttgccaaggagatgcaggtttcccggagagctggatgacaagccctgttgctgctcagcaatgcccttaaggggccctgccccctgcctttataaagccggtgcggtggtggggcagccacagctggcattcagcctccagagcaccagcactggcactggcactggcacacgctatggcaaatgaagtgcaagacctgctctcccctcggaaagggggacatcctcctgcaggtaggctgccacctgccctcagtcctgcaggctgttgctgctcccctcttccaccaatgccttccatggagcaccccgacagacggaagcttctctgtctacccagtatgactttaactccatgcagcctgacttcctcttatgtctttgatccttcttagcttgtatgtaaatccacccggggatttgtcagacccccagtgagttaaaacctaattacctacggcagtgtatggatttggggcttgtggaaaggcataggtagagaggttgcacctttcctccctcgaggcagcattcctttcacggggccctggctgtagattagcagtgacacatctacaccaggaagatgatttgctaccatggaaacctttctctttagaggttccagctgtaagactcagtctccccaagatgcctgtgcatcatgtgacttcctacccaggcaaagcagcttctgcacagaggacaacaatcacatttctttctccctcctcaggctttggggatgtatttacctgtcaacaagctgagaagtacttttaaataaagacacaggacttgaggaggctgactggaaaaagtagctgtcaaggtgtttgcaaagcatccatagttgtctttttttttaatttatgctatctatattgactctctggaatatggaaattagttttattgtacttaaccatatgttcatatagattggctgaggtgtacaggcctatttttagtcagttttatattcttccaactgccttccttcttttttactgaagaaagaactcaaaagcttgactgctttgttcttgcctttctccatttacaaaaacatatttactgtctaattctctggcacctctaggccaaggttatttcaataatctttgctgcagagggtgatggcgggtattgtcttcacagagagtcaaaatgtaacattgttttggtggctttccggcgggtagcctggccaaaaagagtccagattttactactcattctgagtttccagctctagacatcttggtctgatctcctctggtagattactgatgttttatatttgtaatcaaatttagcaatatttaacattacctatatttaaagttaattatgctagctaatagtcaggaagtatatatgcaaatcattggaagacaggctccttacatagacaaagacaaaagaaaaaagaactccattctcattatgttgtttccactccaacccttcataaaatggctaagatgaaacctgttttgctaaactacatttatgcacaaagaacacagacataaacttaaccaaatgaaagttcgaatgaaaccaccgggaactttctgtccccaccactaatgattgctaattactctgtgtacatagcacaccatgactccatcaagcatgtcacaatgcctctggcatgacaattaattattatgaactgtgacactacagataagaggttttggataattagaatggagatgaaggcagacttttgcctccccactgagcacaagggaacaaagaagtgtcatccttcagcctgtcttgccactaattttaagtctgaatctgtttgtggtggtgcaaaattttatttatggaacaaaaacaagtgccaaaattctgttaatttttcacttgatttttataagcaaaatacagatccctaaaagtgggaagaagatacgattcggtggggagggtgggacatacatagcctttggaatcagacagacctgggtttgaacctcaacttcatttcacatcttcgagcctgagtttcctcatctctgaaacaggatgcaataaataacatctatctagtaagtttgttgtaatgattaaaagagatcacctctgtaaagtatctggcacctgaatgttagcccccttaaaatgcaggcccggtagaacacatcactatcaaaagaaattatcctccccaatttcaagacatcctgatgctggagcggcattagacactactgcagtagttggaacagaaagaaactgcaatggaaaaaatatgtgcctatcccatcacagttaaaaatgaaatcactcagctgggtacagtagctcacgcctgtaatcccagcactttgggaggccgaggtgggtggatcacctgaggtcaggagttcaagaccagcctggccaacatggtgaaactccatctctattaaaaatacaaaaattagccgggcgtggggcatgtgcctgtaatcccagctacttgggaggctgaggcagaagaatcgcttgaacccaggaggcagagattgcggtgagcagagatcacgccactgcactccagcctgggcaacaagagtgagaccccgtctgaaaaaaaaaaaaatcacttagaagtcagcctgctgcatctctttcctacctatctatggagcagtcaatggtttcactttaatgtatattaatataatatattgcatctctgatagccctagttatacatttatgctgtgaaatgagactacataaaacacaaggtggcctgggctccagtaagaagaacttggaattttctgcttttttgatttgtctcaccctcactttcagaagaaccccattatatgaacagcagcaccaaaaatgtgtgagtagaagttgaccccaggaagccagatatatgatgaatagaaagaagagcagtggttcatgactttttctatatttcctgcactttttaattgggtctaagccaaatgaatcagagccattagaggtgttgccactgaatccctaaagagaatatgttttctgactcattaaagagagaaggaagttggagggggagtatgaccaattgtaaaactaatgcagaaaatgggggacaaccataaactgcatatggaccacggtcatttgaaaaccctcacacactccaaaggcttgaatctctcaattccatctgctcaagtcaacttgggggcattggaacaggacagaaccatgaagttagaagagagaggctgtgagattcacctcctcctgccccaggggacagggatttgaggactgcaagaacagctgccattcgctcaatgctgactgcacctggcacagcaaagagacttctagacgtggcaacagccctgcagatgggtgatgtttcacggaagagtgaacggagactcagtgagattgagggacttgccgaaagccacacagctagtgggaagtggagctggaattggaaaatgaagctgacctcatgtcaaagccctcttactctaaagccttttctgtttgctccacaaccttctcttgatgagggttttgggggtcttgattggcagcctaaaatttcctgataaattaactgtgaatgcaaagtgagcattttgcaaacatctaaacttttcattaaaccttcaaatagatgttctcattcacaaggcagagtttgcacaaacctttgtgcctttcagctttttcacatacattgtccatggatttgtgaaggaaaaagcctaatttttttgcaggcttatgtttatcttcactactctctaccaaaaactgtgaaaaagattggaaaatcttagctggaaaattattatttagaattctaaactaactgatgtatttttaaaaatttataaactacaaaagcagtcacaagagtataattctcatgcagagatgggaaagcaaagcttcattttccccgcttaaatttaggttttctagtgaaattatctaaaagagcatctcccttttttacattgtctatctctagttcatcttcattattgaaaggactgaaagtcttaatttacatatttgtactcaacatcctgttaaaatgttaaatcagttcatattttactttgcccaattccaattgatctttctgcaaaggttcaaaaagcaggatagtcccaaacatggagttacgtaaaggattacaaacttaaatggatcgatttggatacagtgaaactttgaaaaggtctcttgagtcagaggtatctagtataagcaaaatgagcaagaacctgattgtgttgcattgtaaataatggcttgtctagaccccaggagatcattgtgatcagtgttcccagcagagattttaagataaccctcccacaaactgaccccacctggttcagtcaccccagtgtagtgacagcccaaatctatatcagtgcatccatctgtagtctagggatattatcttccgcttctttctactgtacatagatgactgagtaagatcagctaccagaacaagtttggtacaagaactctgttctggaaatccaatgtgtgtttcccttatgcttccgaaattgctgagttagagcctacagccctatgacagagacgatttaaagactgctggatggaagtaggaatctttatggggaggactttttcttcttccccctaaaatgtctatcttattgttcctaaggatgaggaattcccatgtttatggtttagctgggtgtggtggcgggcacctgtagtcccagctactcgggaggctgaggcaggagaatcacttgaactcgggaggcagaggttgcagtgagccgagatcgctccatggcactccagcctggcgacagagcgagactccatctcaaaaaaaaaaaaaaaaaaatttggcatttatttctttgttaaatgccttatgctctttccaaagagaaagaagtgatggattttttttgagaggtagatgaaaagagttgaaattataataaggactttataataaacataatctagttcaacttccactgaattccccaaagttctcctaaggtattcatgacaaaagaacttctttcctttactttaatacactgaggtacaaaaaactcgttattgtattaggcaatctatatcatgttgaataagacaagctgttacaagtagccagactgtacctttctagaactcttagtctttggtcttcgttctcacctctggaaccacataaaataaatataaataataattagtaattagtaagtgcctaccatgcaccaggttcttatgtcacctctattttctgacagcaatagtcagtattattccccattgaaggacgtggagacagtctgagagcagttttaagtgtcctactcacagtcacagagcttaggaggaatagagttgtccaaccctacataacatttcctcaccagtaaactgctcctctgccctcatgacagcccttcagatctttgaagatggctccctaagttctctcgctttgcttcttcaggagttatcttactagattccctagttcctcatgtagcatgcctgccttcactctggtcactctcctctgaagattcccagattatcaatgtccttccaaatgagtggtacagaactcagcattccaaagatcttcttttcttttttttagacagaatctcactctgtcacccaggctggagagcagtggtgcaatctcagctccctgcaacctctgcctcccaggttcaagcaattctcctgtctcagcctcccaaatagtggctgggactaccggcaatcgccaccacacccagctaatttttgtatttttagtagagatgggatttcgccctgttggtcaggctggtcttgaactcctgacctcaggtgatccacctgcctcggcctcccaaagtgctgggattacaggtgtgagccatcgcgcccagccagttcttctcatctttaactaaaacaattttgcttctatagttggtaataataattaatccaggtagaagaaaatgtgtaggaataatagcatcagggaaagcaaaaggaacactaacaagaaaataattacagcacactatatatgaaaggcacttgtcataaggagaatgaaaaatactgttgggaggtgtatcaaaggccccagagctcttatctgattcttcttagcattaagcaacagtgctatgagcagtcaccatctcccatacagaggcacacacgcctcaaacattctttgggaaaaagcccatcccttgatttatttcacctgtattccatggctattcagaaatgtttccctataatttcatttttgttgcagattactttgtatgccatatgcgtgtgtataaataatttatgtatataaagaatgtgcatatatatatataatttaaagcagataatgtataaagatagcattttctgaggcttatatacaaaaatcaatattttttaaacttggtaattcaaatgaccaaatggagtttattccatgaatgcaggaatggttgaatagtaaaacaacagatcttagtgatacaaaacccataagagattgacaaggtcatataaaaacagcaaatttctgactggcaaaaacattatcaataaagtcaaaaagcagtaactggtacaatataatattttatatttgcaatgtatctcatggaaaaatagctcctataaatcggtaagaaaaagataggaaaaagactagcaatccaattgaaaaggacaaaagatttgaacagcttacagaaaaggaaatgcaaatggcttctaaaacacagaaccaagctcaacctttaataaaacatgagaaatgagaattaaaacagtgatatacctttatctattttgtaacttactggctgacaaaaccaaacactttgtagctcgcgttgttaacaggggtatggaggaacaacaactgtcatcatggctggtgagattctaaactggtgcaacctctgctaagggcaatttggcaagatttaacaaaattccaaacacgcatactcttaagaactaacaagatcacttttaggaatttccccaacaggtatgcttgtatttgtgcaaaattatgtatctaaaactgttaggagagcaagaacctaaaagagccagagtgacatcatttgaaaatcacctccatcttagaatgagcgaggcacattccttgctagtcacaaccccatgatgctaagatgtttacagctgaggaagcagcttggtaatgcctgcaagaacaaactcttagaaccacagaaagtccagatgggccaatacccataatgataatgctttcaagatagtaacagttatgctttgatgtactcacacaccaaatcgtcaaggatggttttctttacatcagtagaataataaatcttgtcatgttgtctgctcacctgcatgtagtcacagtttagtctttacatagacaagacccctatataagaaaaactgaaaaacagtgtgtttgtgcactcactttctgaggacaccctactctgtaatggaattgtttctaataaacttgcttatttcactgagctctgtgcctcgccttgaatttcttcctgtgcaagatccaagaacctttttttggattctggatcaagacacctctttctggtagcaaaaggatattcattgcagcattgtttgtgatagcagtagattagaaacacatgaaatgtccaacattagggaactggttaagtaaacacaggatgttcatacaataaaatgttaaagcagatgttaaaaagaaaaacacacagatgatatatagagatatagatgtagatgtaaatatagatttggaactttctctaaaatatgtgattaagtgaagaaaataaacaagatgtagagcaatgtgtaccttaggctaccattttataaaaaataaaacctgagtgtatgtgtagaataactgtggatgaagacacaggaagcttataacattagcagtatcttgggagataatctaggaagttggaaaataattgtaggagggagactgcagacctttttatggcttttgaattttgggccttatgcagataagataaccaagacaataaattaagtaataattgtaaagaacaatgatgaagtcagttgacaagggcacagaaaaatagaatacattttctttatttttcactttattggaccacagttttagaaaatcgccaatctggcattttcataaaaagaattaacaggctcaaacaaatcaatgtccatttagctttttctcatttgagcttgtcagattttagatgtgcaaatttcctgggaacagaaaaaaagcatttgctttgacttgctatcttgaaatgggttgttccttttcaaaagttgatttcatctgacattgttaaacacttgaattgctgttaggtcatctgtagcctaattaacactaattgatcacttgaatggcaggattattaatgcagtttaattactcattagaacatctgagcttggccaacaccggagttttggggtctggatggaaggtgggtatctggtagaatcagaaccatctctgttgaattaaatgccttttatcactgtgtgccctgacttttggctcatctctcagaatctggcttttgaaagctttggttggaaaaaaaaatgcaagccacgcacaactttaatctggtgggaaaacagagggtcacgttgtaattgtcggttgctattgtggggaatgtaattggtttgataataagaaaaaatgtttttcagtgaaatgcctaagggagtatgttgttattctcctccccaaatctaaggtgtaacctctgctttttcagtcttggttccacttctctgagcataaacaagtagctctcagcccttcctccacccacacctggtttgccaataaaatatatatattttttattgtgttgttttatacaaacgtttagatctttaaaaaataagttcaaaaattattttcaaatctaaagtcatacctttaataacaaagcaagccttctctcactgttctaacttccatgctgatttttatctgtttgtagtaaaagctggaggaatgagaatttccaaaaaacaagaaattggcaccttggaaagacataccaaaaaaacaggattcgagaaaacaaggtagggactcttaatttttctccatcaccttgaggagttttgagtgactctgcctccaggagttattttaggacaaaccaaggctccctatgcctttggaggcagccagagaagggggcaggagggggagggcgtgatccgtggtgacttagggtgaggggtggggaaaggtaggtggctaccctctggagggattcctctgagagggctcccatcacgacccccacccattctcctcctgtctgcatccagcccagcggccttgcacttaataggcacaggcctaaatgcatccaaacctgacacacatccttttatcctattttcagatcagcctttaaaatattgttcctaggctggccctgttttcataatatgctttctgctgaagtaaatgtcctgaattaaaaataaatgtcttttttgttttaaacccatcactgaattatttagaaagtaatggccactatatttggcatagccagaaacacataggtaccgagcagcctccccgctgctccttccaccataacattgacgcctgccctattctcagaactcagcagagagctgtgggctggatcaggtaagcaaatggcccaaacagtctaggccttgggtaaggaaaaccagagcattccaaaaaacaagaaacacgcagaactgtttctttctgaggagtgcttcagagactattaattttgaaatggtttccacagatcagttgatgagtaattcaaaaggatctgagtagaggatgctccaggcacctccataagagttaaaccatatcagaaagagaatggaaatagactgtggcacttctttgactcttttctataaaattatttttaaatcacttttaaagattgcttcctaatttctgggaagacattttttgaggatttgcctccctccactttagaatgaaatactgattcgctccattagcagcaagtcatttgttatttctgatatcagaaactaaccatcacatgacaaaagggaagctgtgcgtcctcaagagtggaggtcacacgttatttttcttctgacccagcatctaggacagttcctagaatagtgaatgcattctgtaaatgatatcagactgcgattgaattgcaagctgattaactttgagacctattcattctgtatctaaaacctgagtcaagcatgtgccctgcttattgtgacattagttaacctgcctgagccagtggctcaggaactaaagtgtcttatcttggaaatgacttactagtggacagccaaaggacaggtcattcatttctctgcatctcagaaaaatgggacttactattaattctaacatccactgaacaatgcaggcaggggagttggctagagagtaataagatggtgattggaatcttctttaaaaactcaattgttttctaatagtcgttaaatgacaggaattggacttttacagaacttaaacagcaaaagatagctcttgccctaagtaccagggacagaaacaggttatgcggagcttgaatcttatggactttcagggccattttaaaagaaaaataaccaaaaatgaccgatatgaaatgggtagggcccctcccagggccttgggaggagccactgtggcaggagaccctaggcttaaatatcattagctccacatatatccccctctgctatttacatctcctagcagggcatgtgcacaggataggaaagccttgttttcatggacaaacactcctttgtatgtcatcttagagaatagctttttaaaaatatgctctagaccagaattttccaaacatcatcaatccatgtccacttcctaatagcttctacaaaccaacacaaaccatccagaaaaaaaaaaatatgccaagtgcagagtttcttcaagacattgtactgtagatttggccctgattgaaactctcctacaaaataacttggcctgagagaaagaagccagatgcaaaagagtacaagctgtagacggttcattttacgaagcacaaaagcagtcaaaactagtctttggggctataaatgaggatagcagttatccttaggggcagctggtttgactagtggtttcaattttattcaatctatatgcttatagcatgtgcatgtttctgtatgtatatcatatttcaataaaaaggtaaaaaaaaaatggctaggcacagtggctcacacctgtaatctcagtactttgggaggctgaggcgagtggatcacctgaggtcaggagttcaagaccagcctggctaacatggtgaaaccccatttctactaaaaatacaaaaaattagccaggcatggtggtgcatgcctgtaatcccagctacttgggaggctgaggcagaagaatcgcttgaacccaggaggcagaggttgcagtgagccgagatcataccattgcactccagcttgggcaacaagagcgaaactgtgtctcagaaaaaaaaaaataataataataataataataatttggcctgcaaagcttgttgtgtgtagcacataggtacacagaggcaaaatctgtgtcttctagatgttcctaagcaaagtgaaagcataaaaggctggagagacagccctctataaatcatgtggccttttcagtgggaaaattttttaagtcctgttcaaagtttcttttcatcttcacagtgccattgcaaatgttgccaaaatacagacactggatgccctgaatgacgcactggagaaggtgagccgtgggcaaatcacatagcgctccaagtcaatctgcccagtggatccagctgcatgggtgaatgagcggatgaccactgaggttttttccaacccagaggtttgaggtccttgtgaaagaatttgttctctgtcagaggaacacaaagtgatttgagtgggaaaagctgcttctctcaaattcctaaagtgtccatttaataaatcatttcaaaaataagataagaaagtgggaatcatgatggtgagtttgcagaatggtactttgccatcccaaatatttcttggaaacattggcatgtttttataaaaggcagcctgtggagtggggcttcagtggtttttgaccttcctccctgcccctgtgttcctataaggagatattgatttgaggagagggtgggtggtagagggttgcatggtctagggttggaggaaggctgggtaccagctgggtttacccagtgaagtctgcttataaaggtagttgaccaggactatttttatttctatattctgaattccttcttttctttttttctttgagacagagtttcgctctttttgcccaggctggaaagcaatggagcgatctcagctcactgcaacctccacctcccgggttcaagtggttctcctgcctcagcctcccgagtagctgggattacaggcatgtaccaccacccccagttaattttgtattttaatagagacaggatttcaccatgttggctaggctgatctcgaactcctgacctcaggccatccggccacctcgacctcccaaagtgctgagattacaggtgtgagccacctcacccagccatatgtcctgaattccttctaggtagttctagaaactcagaaaactcttaccaagtagacagtggtttggttttccggattgaaaagtttgttttcaaattttgtaggtgagctgagtgagggcccttattctatgtctagtaggcaggtacattacagtcaaggtaatatagagccactctttctgctactgccatgtttatggaaggcgttggacaaagtgtcctctgtagaaggaagacttgctgttgcagccaaaatcagatgcctgaggaccaccagctcagcctttgaaaaagattagtgcagctggcctcctggaaccccatttggcactggcttcatcaccatctatatggccttgagcaagttatttatcctgtggttcagttacatgtgtgtataatggaggtaaggaagagtgcacagcttatagggttgttacgtggagacaatgagctcacatacatgaaggtcttggaagagtctcagcacagagtaacctctttgcactctgtcagggatcgtagtattggtttttatgacagtgaaataagacagtatatctaaagtccatgatgttacagggtagattgcacaaggtaagatcttgatgatgagccatagctacagagccttctcacatgggagccttggttctccactcaggtcgatttagggtgaagtcataagtgactctctgccttcctggcttcagaggcagggctggtgcatgacaccctgtaacataagctgcctgctcccacatcttatattctcttgctcccgcccactaaacaccacttccttagggcaagggaatgctcacagttgtaagtggataggatagaatagacatgttcccctaaaatatttgttaactcgaaataaagtattgaaaaggaatggtcaataaaggttggtcatgctgtgtattaggtatgatgccagagtttacgttctgttcttatagacatgtgatatgcttatgtctttgacatatcacctctttatttcaaaggtaaaaagaataatctcttccctaagtaacaatacttaacaacaataatcagttgtatttggaaaccataagagaacattgagatggtgtgctgttagaaatatttttaacaggccaggcacggtggctcacgcctgtaatcccagcactttgcgaggctgatgtgggcggatcacaagtcaggagttcaagaccagcctggccaatatggtgaaactccatctctactgaaaatacaaaaattagcctggcgtggtggcaggtacctgtaatcccagctactcaggaggctgaggcaggagaattgcttgaacccgggaggtggaggttgcagtgagccgagatcacgccactgcactccagcctgggtgacagagcgagactccatctcaaaaaaaaaaagaaatatttttaacagaaactatacctattttttaaaatatacctttgtgctcagctcagtgtttagtggagtaggactgtggctaagattgcacgggttactggttaggagagcaggtcctggcatcagccataggctgccgggttcctgtgttggctgtgtctcttactagctttttgtcctggggcaggtttcttcacttttttgtgctcctctttccttatctgtaaatgggagtgtgagtaccagtatctacttcatagggacatgttgagagtaaaatgaagttacataatacatgcgcagtgctaggatacttagccctcagcaagtgatatcttctgttcccaggcctgcatcctgccttcacttggaatcccaggtaaagcgtaaggcaccagcaacaaaaataagctccaagattaccataagggactatctcaaaaacgaacattggtagaatccatgtgtttccatatagctaagaaaaatctcaccgaatccatcattcaacctgaaacctagtaagatttcacaataaaggtcaacctggggttgacacctgctgaccactagatctaccaagatcagcagttgtgtgggactgagtaggaggattgattacaaatgaccagaggaaatttgggggaatgatgggatggttactcatcttgattgtggttgtagtcacaaactgtatgtacttgtcaagactcataaagcagcacatgaaaaagcgtaaattttactgtaggtaagtactttgatttttaaaacagaatagccatgctgcataaactatacagggtgattcaaaaaatatatgaatcgatatataaaagatacagacatacaggtatcttttaatacatttttcctgcactacaatgattctcctcacggtatgtattgccacagagacctaacaatatacagctggtcagaataaatgcagtggcagaattgagagtcacatcctctgcatttattaacatgcattcatgccctcagttacactcatgtctagtcccaagaacccatgttatttctcatacttattttaagaaattaagtctctaaagaaactcctctccataggaactcatcaaccattcaaccatggcaggaaaattctctctgtatgctactcatctctgaattcctacttcaaaatcaacatggggtttaagattttggagattgaaaaatagtccccgaagggctggaattgtgtaaatcaaagtgggaagcagcctagaatctacccccacagtatttccccacctctcccctccacacagcctgctttctcccaccctacctcatttctgctttcctcctcactctccagccagccttccccacctcttgaagccctcaataagagaattcatgttgcccagtggcagaacacatgacatggtattcctgcagaaaacaggctgtgtagcccaaaagctctttaggctagaaatctgggagacctggtcttagatcaagttccacccactacttagaagttatttgaccttttagatgtcacgtaactcctctgggatttgtgctcgttcatttacttttaaaaaattattttaaggcagggagtgaacaagaatgatactgccaaatatattaatcctctggacagtcatggcaataaatttggcaatagttgtgaaacttctcagaacataaaagtatccagttaaaacatccataatggggttgcgttatggtgtggagggggaaatgctgaagcctggttaaagttggggctacttttctcaagctgccagactttgggtcaccactgccaaagccagtgagatgtatgtgaaatgggatcctgggggagagaaaactataaaaggcatcgcaaattttaaaaggcttctcttgttctgtagattaatatcactgtaggagtatccttgaatttcattgacgagagctgaatgttttgttttaagcagtttgcttaacagggtgtggaaatttaagtgccaatattcgagttggaagttaacaccctggaaagatgaatgaaagtgctgccagtctgctaatactacccaacttcaggctctaaaacaaaacctgcagctgattttcttgcgtctagaatttcagggctctctagtcataaagacctctatcacacttcttttgctttttctctgaaatgaaaaatataggttctgaggtcgcagctacccaagatgaaggtaaattctcaatgtggaagtttctattgatccactttctaagttcaatatgttgcccctgtaatggagccacagcaaggcaggatccttgtacatatactggctttgaattctttctctcgtggggttaccctagattctcttaccctaatgaatgagacaagaaacaccttttattctacaaatactatcattttacaaagactaatgatgaaaattccacagcttccccgaagttaaaatgtcagactaaaacacagctggctgtagcttatactctggaaagctgtttctacttatttgtagtttagagttgaaaataaacttttcctatctccattgatataaaatctaccacaaagaattagtacatttaggagctgaccattttaccgacagtttcatcaattctgatgaagatcctttatagactctccacccatagccccaagtcctacatcaggatgcccctgactgaggcaggtagggagatgagaaggagaacttgactttcctgttatcatattttcaagttgctatgaaaccctgctctgggcaccccaaaagctgtacacttgtagcttaacaattatgggcagtttctctattatctttgccagaattattcctacttttttctcaatcctgttgattttcttttcttctctaaaactttccagatcagttcagatggccattgggccacaggggctgactttgtttcccaaatattctgatctgtggcattcctcttctgagaagtagttgagcagtgcttttagaacttcggttgaatgcctcagttaaaatgtaacccttaacacttctgtattgctggtgggaatgtaaaatgatccagctgctgtggaaaacaatacagtggttcctcaaaaaataaatatagaattgccatatcaggctggacgcagtggctcataactagaatcctagcactttgggaggccaaggcaggagaattgcttgagctcaggagttcgagaccagcctgggcaacatagaaagaccttgtgtctactaaaaatataaaaaattagaccagcatggtggcacatgcctgaggtcccagttactcaggaggctgaggcaagaggaccacttgagcccgggagttcaatgttgcagggagcagagatcacacccctacactccagtctgggtgacagagcaaaacctcagctcaaaaaaaaaaaaaaagcaaagagaaagagagagaattgctgtatgatccagcaattccacttcttccaatataatcttcccatatattggaagaattgaaagtagggactcagaacagatatttgtacaccaatattcatagctgcatcattcacaatagccaaaagatgaagagatcctaaccaagtattcatcaatggatgaatggatagaaaaaacgtggtatatatatatacaatggaatattatttaaccttacaaaagaaagaaatctcaacacatacagtaacatggatggaccttgaagacattatgctaagtgaaataagccagacacaaaaggacaaatattgaatgattctacctatgggaggtacccaaagtagtcagattcatagttatagaaagtagaatggtggttgccaggggcttggaggaggagggaatggagaattactgtttaattggtaccgagtctcagtttaggatgatgaaaaagttctggaggtggatggtgttgatagctgtgcaataatgtgaatgtatttagcaccactggactaactgtacacacactttaaaatggttaaaatggcaagttttatgttttgtatatcttagcacaatttttttatatgcccaaacgatgtagcctctaaattgtggagatcaccctggaggtgatcaaataacaaattagtgcccaactaagcagcaaatatcttctatcacttattctaacactactctcctttcctttttcttttttttttttttttgagatggagtcttgctctgtcgcccaggctggagtgcagtgacccgatctcggctcactgcaacctccgcctcctgggttcatgccattctcctgcctcagcctccagagtagctgggactacagtcgctcgccaccatgcccggctaatttttcatatttttagtagagatggggtttcaccgtgttagccaggatggtctcgatcgcctgacctcatgatccgcccgccttggcctcccaaagtgctgggattgcaggtgtgggccaccgagcccggcctcctttcctttttcttttcctacctccacccatcatctctttcacacttaagaacaacaatcaacatgtggctttctttgtttcagtcccaacttgtcctcttaccctcccttaccttggctaattgcccaaatttctgttatatcagagtttttttgtttgtttgccttctcacccacttttaccttaactgacttgtcacatttttcttcctacctgcaatctctcaaatatgatttaaagctaacctgaaataattcatctattttagttaagactaaagacacacagtctggaagtaaactactgaagtcagtgacctcttaaatttccttctggatctaatgttgaaagaaaaccaaagcaaaacaaaacattctgcccttaacacattgtaaaatgcatgtcatatggtctgatgataactgacctgacaaaaaaaaaagtcatcaggtcttttttagactctaatgcaacatttatgatcaatatctcaattgtgttttgtttccattctgctagaatgttggcagagataatccttgggcttaatttttgtataacttgtacctgctcattgtaaaagaaaaaaaatttagtactgataaataaagtgaagaaaaagagaggcattgcccataattctatcccccagaggtaaccattgctaacacttcagtgtattttcttccagtgtgtttaattttttaaaaccaagaagaaaggactttttggagtcacatttcgtatgaaagggactgctgagtgcctagggcctgggcagagacatttgagaagagatgtaaggcacatatgttttccctggcttagaagagcccaaacaaaccatgaacagtatgatggctagggtcatgaacagtttatctccccttttatttaatttgagtgccaaggcaagggcatctaagttcaatagtgataagttaaattcctactgagctgaggcattccttccttgctggccaagggaggtttctttaggtacttttacatattgatgggcttggaaaccaagaactagcatggacccaaaaggtcactgtgtccaaattctcctcctaggaaaaccatgtctgaagtggtcagcagcattgggcatgctttctatcttaagctatcattaatgtaaattccacaaggtctctgggttgcatatgaaatgtctcttattgtcagaaagtctcagcctgtgttaataagcctatttaagcttatttactcatagatgtcttctgtggagaagactaatcagaacttttgttccctgaggctagtaggccatccctcagccttctcttcactgggctatttagattgaaccatatggaatggccaatatcacatcatttttgacctgaaaaaatagcaaatgtacacacttagacctaataaataaccctaactcttcttaacttctttcagaggttctttctttcttttgacaattgaggagtttttcgtccccactctggaccttctccaatgtccctgtagccttcttagaattcagtgattcatagatgcatactagtgccagaataattgctaacaacacagagaactgatgcagacataattaaccattcctactttttaaaatgtcaattggaattttttaaaattaaggacagtaaatgagagaagacccaggttaaaacatactcccatgggtttagggctagaaatagtatggaaaaaaagagatattatcaaataaataaacaaaattgtgagattcccttgatcaacgatatcactttctactagtttaatatttcatgaccaagaagatccaatatgcctattttttcttcccttctcacctttagctcaactataaatttccagcaacagtgcacatggcgcatcaaaaacccacacctgctctggaaaaggttgttccactgaaaaggatctacattattcagcagcctcgaaaatgttaagcctggatttaaaacacagccgtctggccagctgcctcgaatatctgacagcttagcaaaaagggccaaagctttccataggcgtgctgcacttgcttggtaaattaagcagcttttgtatcttcccctttgactttaggtaataaagcatccaaacttgtaaatctgacacatccctgtgcctctttttggtccaggtcagaatcccattgatgtttgcatatgtaattctgtagattaagtgaagcatccagaatacctgactgttccatccacctccctacataagcactcttcttgacgctgaccctgaattgttctaccctcattgagttctccttgaaggcagaggttggagaggagtagactgggcttggcaaaggccaatatccaatgcaaacataaggagtgactcttctcagtttgtttgtctaaggatgttcaagttttcacttgaggcgaaatgtcttttccagtttcccacataagtacatagtttgttttcaaggctcagtgtgggaaaatgaaaaattaaattgattacaaacatattattttctgccaagcaatcaaggacagaaggtagaattatagcttcagtgggagagttgctcagggccttccagaaagctccagaacagggcattgtcgttgggctacagaagttattttcactggagatggtgtgggagagagagtattgccataactaagcatgcactagctcttctcccctctaccacacacacacacacacacacacacacacacacacacacttcatgaattcacatgtaaacagtcaagggcattctcaggtgacagctggggacagccatatcatttcctcacagaagttggctgtcactcactgcttcaccattctgcacctccagttgagaatgctattggactaccagcccttctctttacccagggaaaggggccagcacttcagtccttcattgaacaggttgacaactcttggagtatgacctggtgctgagcctgtctctgattcttggaaacaagaggcacttggctaatgcccacttggatgtggggatgcatccacctcctcccctctattttttggctcttgttcaggaataagagaattgctagagacaatatcagaccttcaggcaatgccagcatgaatcagtaagacagttattaccacctcattttggcttagctcagtttcctgtcctctgggactgctgtcagatatatcccaggaagataactgttgcaaggaaaatggacagaagttcaaggtcagccaccattttccaaggcgacagtaacacagaccagatggtgggtacaggttggaacattggacaaatgttcaggagacggagattctactactgacccttactagttctgcaaccttaagcgagccacttaacctttccaatccttgccaaatgggcacaataacacctgactccccaactgaaccctttcagtgttgcatactgcaaagaggataaaatgactactgagattggtaaaagctaattaaagagtagtgtgagagcaagatggtgccaggatgcctatcctagaagctgccagaactagagtaatagtagaactctattaagttgagactagaacaggaaattcagagaaaaggtggagatttggggctagatggaggcaggaaggaaacacgaggagggggtgataagagaactgagaaacacagatgatggcactgctagatttgcctttctttagggtgatatgagggccagccacccaaaggaagtgagaagggaggaagggtaccattttctctgtctggagatgagggttgtactgtgggggaagggaggctgctcgaagggagcctatgcagtgaggacccacgcattaacttgagtctacaattacagtcatttaaatcaccaagtcacagggagtcagacgtttggtatgagcttcagatctgaaaggaaattggaattcccttggctaatgtaacagcagaagaaggtccaggagagaattctgtggtgatgtggaggcatgtgcaagaggccacaagagctgcccactgtccctcctgaggaagagatcctggcatggatgtgctgtggctccactcaggagcccccagccatgggtcatgggcccagcaaaggccatgacaaggaggaggggctgccgtgggctgggaattcactggcagataattttcttcagttcatttcagttctgttcaccagattctatgctaggcactgggacatgaagatgaataagacacagaccctgtccgccaggatctctcagaccaaagggaaatggacccccaacaaattaataacaagagagagtatagatgcggcttggtgggggctggggtcatgctgtggatgaggctcaagaactcacctgaaggtcatgtgcaagccaaaaaaaaccatggtggctgtggagaccaataactcacgtgtggatctttaataaacagactttccttaagcttattatgaaatcttcaaacatacacaaaagccaagtggctattatattaaaccctcacttacccatcacagggcttcaacaatgtggaccgtcttggtttggctacagcatccggccccctacttctttgctcttttccctctctccttctggattattttagagtgaagcctaaacctcatatcgtttcatctagagatacttcagtatgttatctccaaaagataagccttcatgtgtgctctctctctctctgtatctctttctccttctgtaaactgatttttcaccaagattgaggagaatctttccccacagaagggagactagcattgctagctatgctaggcacaagagccaaaacaaacaagaccgccactgagccagggaagctgagagagtgtgtggagttcagagagtagatgatgaagctggccttcaagtccaaggagggaaccaggaaacatgaagttgctgaggacaaacaagaggtacaggaagaaaatgacaggcaaaactaggtcttgccgaggaaaaagatatagagaacacttagaaatagctatttctgaggccactcaaaaaaacacagagtaagagaggaacaaaggatgataaattattggcaggaaaaactaaaatcaatttatccaacaaacacttgccaggtttctcctgtgtgataggcttcgtttagatagaccccaagtccaaggaatatatgcctagcatttgacatatgtcatgttttatctgatttattttatttgtttatttatttattcattcattcattttgagacagggtcttactcggtcgtccaggctggtgtgcagtggcgcgatcatggctcactgtagcctcaatctccccggttcagatgatcttcccaagctgctgggaccacaggtgtatgccaccacatccatgtctggctaattttttattttctgtagagacaacgtttccccgtattgcccaggctggtctcaaactcctaggctcaagcgatcctcccaccttggcctccaaaagtgctggcttacgggcatgagccactgcacctgacctgggctatgttttgttttaaagaacatctagatgtcaggtggtgtcaccaccccctttagaatgataagattggctcaaattcccatattatccccagtggatattcaaagccctctccaagatgtctgtaaattcccaggagggttacactggtatggtcacctctgattttcagtgaattcattaattccttgctgtccctgcgcccccaccaccctgatctggacccagctcttttccatgatttccctaaaagtcttcttcagtgggtggcaaaatttactaaagacttgatagagcatttacatcatggtaaccagatgacatccagtagaatgtccgctaccctcattctatttgtgtgtccttccacgcacttcccactgccacccccaccccaccccaccccgggacttcattcactattcatgtcacctggggcagcctccatcttgctggcagtgctcccctctcccactctcccttccctcacttttcttcccttaccctgttcagtttcaaattcgcaattcagctacttctctggttgttggacccctggaaaaccatgtcactttaccccagaatagtctcctcaccctcaaacagctgtgacaccaactgtcaggatgtcaacatttttgtccaaatatgatagatgaacaatgaattaattagaaaaaatgaagtgatagagaacctgagacaagagaaatgagaagccaaaggaaaaggaagagaagtttcaaataaaatcttgaaggcctgaaagaaatacaaacacaaaagtagggcaagcagagcttctgctaaaaaatatataagacagaattttaaacatagttttccatacagtatttcatggaattgtcacaagaattctgaaagatgatagctgttattatcctattataccgatgggaaaaatgagcctctgggaaattaagagattccttaatgtcttatagtttgttaactagagaaatttatctggggctctcgtaatcccaaatctagagctgtctctgttgctgacccgtaagaaaataggttggagctgaagcttagaagtctccaaacagagaggatcgagatctaattttgacttaggaaatagaaatgaatttgaagagagaaatctgtgtgtgagagaactgatgtgggattcaccgaatacctcaatagggaggagccacacaaacacagcttctcagagttttctttgaaaggtgctaaggtttgaatgtttgtctcctccaaagctcatgtggaaatttaatctccaatgtggcagagttgagaggtggggcctttgagaggtgattgggtcaagagggctctgccctactgcatggattaatgcattcagggattagtggattaatgggttatcatgggactgggcctggtggctttataaggagaagaagggaggccttggcttagcatgctcagccccctccccatgtgtgatgctctgcaccacctcgggactctgcagagaacctccaccaacaagaaagggcccccagatgtggcttctcaaccttggatttctcagcctccataactgtaagaaatagatttcttctctttataaattacccagtttcaggtattctgcaacagaaaacagactaagacagatataatgtgaaagcttgaaagatcatggaagtgaactgggttgtgagaaaagatcaaatgtacaggatgagccttcgaaagacaaatgaaagataaaaggcaactttgcacaggacacctctcctgtgtacagcaagagacatgaggctaggggacatgtcaagtgaggcttcggaaaggagctagggcaggggaaaggtgaccttgcactgaagtattcattatcagactgtaaggtgtagtaacagagatctgaatgtttcctacaatggctttacaaatcagtctaaatcattgcagaagcatgttttgaatgacctggatgcctactttatgagcaagtgtattacaggacctctgacccaagttcacactgggatttttaacccatcaacagtgccagtattctatctcagagacctatgagaaaagaatggaggaggacttaacagaaatgttcctcgtgaacaaaatgtcatggtagtgtgaaaagagacaaatgagagaactgagtcattgtaaacttgctaaagttatgaaactagccagaatcatatctatattagaacagccattgatcataaataaaataacttaggtcaacactgtggatgcagaggaatttttttttcttttttaaaagaaggcctatcagttattcaaattaaagaaccattcgagtggagagaagaatgtttatttagctgcccatgctagccgtttgaatatggcaggattgaaaggatcataagcaaaaatgctagaggtcataaaatgtaaagtgcaggattttatcatctctatgtacacgatgaagagattgaaattaatttctaaaaacataggaaattgggtagaagtgaagaagaacagaagtcctgctcctctttaaagatttcagaaaaatgaaacattttctttaacaaataaagagagctttccaaaggagtatagccagaggcttttaaggataaaatagatattgctgcagaagtgtttaagagacagcacaggtaaataaaatggaggtgaagacactggagcagaaatagtgaaattgaagaccagatgaaacagaatggggaggatgagagcagaaaaggtcaggcaagaacaaaaacactctcaccagaaacctgaggtctgggagaagagcgaggacggtcacaagattaaaatggacagaataagaaggcaccagtagagagccttgagataatggaaaggtttaaccaaacgtatcaagtgcaaagaaagattgagtggccagctcggctgtaggctgacgaagaaacaagcaatctgacagcggacatcatgggtcaagtggctgggagtgagctgggtttggaagaaaggaagcaccccgggtctggcaggcgtcctgcgtagttccaccaggcgtttaagaactgagcaaagcactgttttccgtgacagacacttgagagggaggcggagtgtcctgtacagtaaaacaaggagctgggatgttaaaaaaaaaaaaaaaaaaaaaaaaaaacaaaaaacaaaaacggaaggtggatgctgggaagtagaggtcactatctttataaacctgtagttggagactttgtagcagaattctagacaaagtttaaacagaaaaagttgtctggactggtgtgaaatgacaaaaatgtcaggggcttagcagggataatcaacagtgtgggtgggggtgggagagggggatggtccctgaccacacaagcatttgtaaaaaaaaaaaaaaaaagaaaagaaaagaaaagaaaaaagaaaaaaagcctttttgctgtgtctccaaggactagctatttggcctcccttttctgattcctgaaacacaccaaacgggctggagtagcacaaatcagtctatttttatcaggcaagaatgaaggcccaatactgccatatctttttattcttctcaaaagcaatctgaaatataggttttgtgtgaaatcttctgaatttgatacgttggctcaactttcttatgtttatttatttattattctttttttttttttttttttttttttttttttgtctgagacggagtctcgctctgtcgcccaggctggagtacagtggcgcgatctcggctcactgcaagctccgcctcccgggttcacgccattctctgcctcagcctcccgagtagctgggaccacaggcgcccgccacaacgcccggctaatttcttgtatttttaggagagacggggtttcaccgtgttttcctgacctcgtgatctgcccgcctcaacctcccaaagtgctgggattacaggcgtcggccactgcgcccggcctttcatgtttatttttactatacactgtgcagacaaataattgagtctgcatgttcaatttggcccatgggccaccgtttcgtacaagccaagattttcacaccgagcctgcacaaccgtcctacgttcctgatgacctgagggatgtaagggcagggcttgcctctctgacaggagggatgcaaggaaatagttaataaccttagagtttggcaagaagtaggatgtgaagatgagaaggaaatggcccactttaagcagaggccggttttagtttccgcaggtggtagcattctggcagttactgaagggtttacatcagcactggcaaaataaaacacaaggtcgtaaaaataaaagaaccagagaaatctgataatattgatggtacggatggatgaagaggctaggcccatgaggatttctgtttcacggtttggagggtgtagaataatagctatcatttgctgagaatttactgtgtgccagaggctgtccattatatttaatctctaatatttacaacaaccccttttacaaatgctgaaggattattcagaggagttaaggcatacaacacccaggcccctggacctttatgctttctcctttaactggaaatctctccattacttttttttgccaaaatattcattgcaacactactcacgtgtttaaaaagccaacaaaacggtcaaataattcctctcctagatatatagccaggaaataaaacacatatccacacaaaaacttgtacacaaatgtcacagcagctttattcataatagtcaaaaattaaaaacaactcaaatgtccatcaactgacaaacaggtaaaaaagatgcggtatctctataccctggcatattacttgacaataaaaaggaatgaagtgctgattcatgctacaacatggatcaatcttgaaaacattatgctaagtgaaaaaaagccagtcacaaaagaccacatattgttccatttacataaaatgtccagaataggcaaaattatacaggtagtaagtggaagtggttgcctaagactcagggacagaaagagttggaggttgcatttttaaccctaaatattaatagtatagggtttctttgaaggatgctgaagatgttctcagattgattatactgatggtggcacaactctgaaaatactaaaaaccattgaattatacacttaaataagtgaaattgtatgatacatcaattatcccaatagagctgttacaaaaaaaaagttatgaagagaacattgattttgaaatatctgttgcatgtcatgaaacacaaattattacctaataaaggttggcaccaattttatattctaacttcttcaccaacccaaactgtggtccaatccccaggcttgtggccctcaatactggggcttggctacaccttgggccttagactatccagggcgtaagcattttgtgtgtgtgtgagacagggtctcactctgtcatccaggttggggtgcagtggcgcaatcacagctcactgcagcctccacctcctgggctcaagagatcctcccacctcagcctccagaatagctggggactacaggtgtgagccatcatgcccagctaattttttaattttttatagagacaaggtctccccatgttgtccaggctggtctcgaattcctgggctcaagtgatcctcccgtctaagcctcccaaattgctggtattacaggcatgaactactgtgcctggccctcacataagcatttcacatacagtatctcatttacttccatgacagccccaagagaagggtattattattattcccatgggaaggatgaggaaatgcttagtgagactgcatcatttactaaacaatgaagttggtatctggcagagccagggtgcaaaaccagacagctggatgtcacagcctggacttcccacacaaaaccccacatgctcatacactgtttgtgggattgtagattggtacgtattaactttctggagggtaatttgacagggtgtatcaaaagttattttaaaaacccatactttttaacccagcaactctacttctaaaaatttattctataaaaattattggacaagtaaataaatatatatatacaaatataaggatgttcatcaaggtattgtgtatatatagcaatagccaattaaaaagactttttaaaagaaaaattcttatttctgtccacaaagtattggctaaatttagcccagcacatccctctggcagtgtagctgagctcaggaagggtatgttctgtggattagcatctggggagagcaggaggggtcagaagaaacaggagaataggaaggaagaacccttcaccaaaccaggtcatgaggcccagcctgggctgacgtgtgtcacacttggaaaggtcacctcctcaccaccatcccagtcttcatgaggattgtagagcagtgtctattaatgacagaaccattcttcaatgtcgtttacccaaaacatatcatctagcattaatctattcatagaatgtttctgaaatatttttaaactagttttgggggctgggtgcggtgtaatcctagcactttgggaggccaaggagggtggattg

SEQ ID NO: 1238 - DNA, 534 bp, Homo sapiens
cctccagagcaccagcactggcactggcactggcacacgctatggcaaatgaagtgcaagacctgctctcccctcggaaagggggacatcctcctgcagtaaaagctggaggaatgagaatttccaaaaaacaagaaattggcaccttggaaagacataccaaaaaaacaggattcgagaaaacaagtgccattgcaaatgttgccaaaatacagacactggatgccctgaatgacgcactggagaagctcaactataaatttccagcaacagtgcacatggcgcatcaaaaacccacacctgctctggaaaaggttgttccactgaaaaggatctacattattcagcagcctcgaaaatgttaagcctggatttaaaacacagccgtctggccagctgcctcgaatatctgacagcttagcaaaaagggccaaagctttccataggcgtgctgcacttgcttggtaaattaagcagcttttgtatcttcccctttgactttaggtaataaagcatccaaacttgtaaatctga

SEQ ID NO: 1239 - protein, 107 aa, Homo sapiens
MANEVQDLLSPRKGGHPPAVKAGGMRISKKQEIGTLERHTKKTGFEKTSAIANVAKIQTLDALNDALEKLNYKFPATVHMAHQKPTPALEKVVPLKRIYIIQQPRKC
